United States Patent Application Publication US 2025/0313894 A1 - sequence listing, part 3

SEQ ID NO: 47193 - DNA, 50 bp, synthetic construct
  source 1..50: mol_type = other DNA
aacaattctcacacaaaaaaaaccaactctcaaaaaaaatccaaataaca

SEQ ID NO: 47194 - DNA, 50 bp, synthetic construct
  source 1..50: mol_type = other DNA
aacgattctcacacaaaaaaaaccgactctcgaaaaaaatccaaataacg

SEQ ID NO: 47195 - DNA, 50 bp, synthetic construct
  source 1..50: mol_type = other DNA
tccactatttaaattcctcccaaaaaccaactctccctatataaaaatca

SEQ ID NO: 47196 - DNA, 50 bp, synthetic construct
  source 1..50: mol_type = other DNA
tccgctatttaaattcctcccgaaaaccgactctccctatataaaaatcg

SEQ ID NO: 47197 - DNA, 50 bp, synthetic construct
  source 1..50: mol_type = other DNA
ctccctatataaaaatcactaccctatatacctatatatcacacaaacca

SEQ ID NO: 47198 - DNA, 50 bp, synthetic construct
  source 1..50: mol_type = other DNA
ctccctatataaaaatcgctaccctatatacctatatatcgcacgaaccg

SEQ ID NO: 47199 - DNA, 50 bp, synthetic construct
  source 1..50: mol_type = other DNA
aaatatctatcttcatcatcctaaccctttcacctaacacaaccctctca

SEQ ID NO: 47200 - DNA, 50 bp, synthetic construct
  source 1..50: mol_type = other DNA
aaatatctatcttcatcatcctaaccctttcgcctaacacaaccctctcg

SEQ ID NO: 47201 - DNA, 50 bp, synthetic construct
  source 1..50: mol_type = other DNA
tcaaacaactaactcccctaaactaccaactaaataattacaaaaccaca

SEQ ID NO: 47202 - DNA, 50 bp, synthetic construct
  source 1..50: mol_type = other DNA
tcaaacaactaactcccctaaactaccgactaaataattacgaaaccgcg

SEQ ID NO: 47203 - DNA, 50 bp, synthetic construct
  source 1..50: mol_type = other DNA
ctacctataccctaaactataaaaacaaaaaacaaatacattaaaaaaca

SEQ ID NO: 47204 - DNA, 50 bp, synthetic construct
  source 1..50: mol_type = other DNA
ctacctataccctaaactataaaaacaaaaaacaaatacattaaaaaacg

SEQ ID NO: 47205 - DNA, 50 bp, synthetic construct
  source 1..50: mol_type = other DNA
aaaactaaaaaaatcctacactattatattaaatacaatctaacaaaaca

SEQ ID NO: 47206 - DNA, 50 bp, synthetic construct
  source 1..50: mol_type = other DNA
aaaactaaaaaaatcctacgctattatattaaatacaatctaacgaaacg

SEQ ID NO: 47207 - DNA, 50 bp, synthetic construct
  source 1..50: mol_type = other DNA
ttagaaagagttggggttgttttagggaataggtttatttagaagttatt

SEQ ID NO: 47208 - DNA, 50 bp, synthetic construct
  source 1..50: mol_type = other DNA
ttagaaagagttggggttgttttagggaataggtttatttagaagttatc

SEQ ID NO: 47209 - DNA, 50 bp, synthetic construct
  source 1..50: mol_type = other DNA
aaaaaaattaaaaatctaaccacatctccctaccccacaaactaaaacca

SEQ ID NO: 47210 - DNA, 50 bp, synthetic construct
  source 1..50: mol_type = other DNA
aaaaaaattaaaaatctaaccacgtctccctaccccacaaactaaaaccg

SEQ ID NO: 47211 - DNA, 50 bp, synthetic construct
  source 1..50: mol_type = other DNA
taaaaaataacaccatatcaccctcaccaaaactcatctctccattccca

SEQ ID NO: 47212 - DNA, 50 bp, synthetic construct
  source 1..50: mol_type = other DNA
taaaaaataacaccatatcaccctcaccaaaactcgtctctccattcccg

SEQ ID NO: 47213 - DNA, 50 bp, synthetic construct
  source 1..50: mol_type = other DNA
taccaacaattaaaaatataccaaaattaaaaaaatccacaactcccaca

SEQ ID NO: 47214 - DNA, 50 bp, synthetic construct
  source 1..50: mol_type = other DNA
taccgacgattaaaaatataccaaaattaaaaaaatccgcaactcccacg

SEQ ID NO: 47215 - DNA, 50 bp, synthetic construct
  source 1..50: mol_type = other DNA
atcaacaattataccaacaattaaaaatataccaaaattaaaaaaatcca

SEQ ID NO: 47216 - DNA, 50 bp, synthetic construct
  source 1..50: mol_type = other DNA
atcaacgattataccgacgattaaaaatataccaaaattaaaaaaatccg

SEQ ID NO: 47217 - DNA, 50 bp, synthetic construct
  source 1..50: mol_type = other DNA
tttcccctcctcctatccccaataaatcttaacaaaacttttaccctaca

SEQ ID NO: 47218 - DNA, 50 bp, synthetic construct
  source 1..50: mol_type = other DNA
tttcccctcctcctatccccaataaatcttaacgaaacttttaccctacg

SEQ ID NO: 47219 - DNA, 50 bp, synthetic construct
  source 1..50: mol_type = other DNA
ccctctcccccacacattcaaatacaattatacacaaaacaaaaatctca

SEQ ID NO: 47220 - DNA, 50 bp, synthetic construct
  source 1..50: mol_type = other DNA
ccctctcccccgcacattcaaatacaattatacgcaaaacaaaaatctcg

SEQ ID NO: 47221 - DNA, 50 bp, synthetic construct
  source 1..50: mol_type = other DNA
aaaatacctaataaattttacaccatcttaatatctacataacaaataca

SEQ ID NO: 47222 - DNA, 50 bp, synthetic construct
  source 1..50: mol_type = other DNA
aaaatacctaataaattttacgccgtcttaatatctacgtaacgaatacg

SEQ ID NO: 47223 - DNA, 50 bp, synthetic construct
  source 1..50: mol_type = other DNA
ctcacaactttacaataaaataaaattcatctaaaacccaaccaaaaaca

SEQ ID NO: 47224 - DNA, 50 bp, synthetic construct
  source 1..50: mol_type = other DNA
ctcgcgactttacaataaaataaaattcgtctaaaacccgaccaaaaacg

SEQ ID NO: 47225 - DNA, 50 bp, synthetic construct
  source 1..50: mol_type = other DNA
aacaatcaatctcacaactttacaataaaataaaattcatctaaaaccca

SEQ ID NO: 47226 - DNA, 50 bp, synthetic construct
  source 1..50: mol_type = other DNA
aacaatcgatctcgcgactttacaataaaataaaattcgtctaaaacccg

SEQ ID NO: 47227 - DNA, 50 bp, synthetic construct
  source 1..50: mol_type = other DNA
aactacaaaaaacaactttcactaacaaacttaaacttcccaaacaatca

SEQ ID NO: 47228 - DNA, 50 bp, synthetic construct
  source 1..50: mol_type = other DNA
aactacgaaaaacaactttcgctaacaaacttaaacttcccgaacaatcg

SEQ ID NO: 47229 - DNA, 50 bp, synthetic construct
  source 1..50: mol_type = other DNA
tactacaaaaccacaaaaccaattacccaaaaaatctaaacctactaaca

SEQ ID NO: 47230 - DNA, 50 bp, synthetic construct
  source 1..50: mol_type = other DNA
tactacaaaaccgcgaaaccgattacccgaaaaatctaaacctactaacg

SEQ ID NO: 47231 - DNA, 50 bp, synthetic construct
  source 1..50: mol_type = other DNA
aaaaccaattacccaaaaaatctaaacctactaacaaaaactactctcca

SEQ ID NO: 47232 - DNA, 50 bp, synthetic construct
  source 1..50: mol_type = other DNA
gaaaccgattacccgaaaaatctaaacctactaacgaaaactactctccg

SEQ ID NO: 47233 - DNA, 50 bp, synthetic construct
  source 1..50: mol_type = other DNA
acctactatctaaattataaactaatttcaaaaatcaacaaaaaaaccca

SEQ ID NO: 47234 - DNA, 50 bp, synthetic construct
  source 1..50: mol_type = other DNA
acctactatctaaattataaactaatttcgaaaatcgacgaaaaaacccg

SEQ ID NO: 47235 - DNA, 50 bp, synthetic construct
  source 1..50: mol_type = other DNA
caacaaaaaaataataaatataaaaacctaaacccccttaaaaccaacca

SEQ ID NO: 47236 - DNA, 50 bp, synthetic construct
  source 1..50: mol_type = other DNA
cgacgaaaaaataataaatataaaaacctaaacccccttaaaaccgaccg

SEQ ID NO: 47237 - DNA, 50 bp, synthetic construct
  source 1..50: mol_type = other DNA
aactcaacaaaaaaataataaatataaaaacctaaacccccttaaaacca

SEQ ID NO: 47238 - DNA, 50 bp, synthetic construct
  source 1..50: mol_type = other DNA
aactcgacgaaaaaataataaatataaaaacctaaacccccttaaaaccg

SEQ ID NO: 47239 - DNA, 50 bp, synthetic construct
  source 1..50: mol_type = other DNA
catattactactcaactcctcaactatacatacaaaaaacatcaaaaaca

SEQ ID NO: 47240 - DNA, 50 bp, synthetic construct
  source 1..50: mol_type = other DNA
cgtattactactcaactcctcaactatacgtacgaaaaacgtcgaaaacg

SEQ ID NO: 47241 - DNA, 50 bp, synthetic construct
  source 1..50: mol_type = other DNA
tccccacatctcaaataaatactaaaattactatcctaactacccaaaca

SEQ ID NO: 47242 - DNA, 50 bp, synthetic construct
  source 1..50: mol_type = other DNA
tccccacatctcgaataaatactaaaattactatcctaactacccaaacg

SEQ ID NO: 47243 - DNA, 50 bp, synthetic construct
  source 1..50: mol_type = other DNA
aataaatactaaaattactatcctaactacccaaacaaaactacaacaca

SEQ ID NO: 47244 - DNA, 50 bp, synthetic construct
  source 1..50: mol_type = other DNA
aataaatactaaaattactatcctaactacccaaacgaaactacaacgcg

SEQ ID NO: 47245 - DNA, 50 bp, synthetic construct
  source 1..50: mol_type = other DNA
aacaaaactacaacacaaactaaacttccacctacaaaaaccacataaca

SEQ ID NO: 47246 - DNA, 50 bp, synthetic construct
  source 1..50: mol_type = other DNA
aacgaaactacaacgcgaactaaacttccacctacaaaaaccacgtaacg

SEQ ID NO: 47247 - DNA, 50 bp, synthetic construct
  source 1..50: mol_type = other DNA
tctactctaacccccattacctaaaaataccaaaccaaacaactaaaaca

SEQ ID NO: 47248 - DNA, 50 bp, synthetic construct
  source 1..50: mol_type = other DNA
tctactctaacccccattacctaaaaataccaaaccgaacgactaaaacg

SEQ ID NO: 47249 - DNA, 50 bp, synthetic construct
  source 1..50: mol_type = other DNA
tctaacccccattacctaaaaataccaaaccaaacaactaaaacattaca

SEQ ID NO: 47250 - DNA, 50 bp, synthetic construct
  source 1..50: mol_type = other DNA
tctaacccccattacctaaaaataccaaaccgaacgactaaaacgttacg

SEQ ID NO: 47251 - DNA, 50 bp, synthetic construct
  source 1..50: mol_type = other DNA
ataacatacctccaacatatcaacttcctaatatctcttccaccttaaca

SEQ ID NO: 47252 - DNA, 50 bp, synthetic construct
  source 1..50: mol_type = other DNA
ataacgtacctccaacatatcaacttcctaatatctcttccgccttaacg

SEQ ID NO: 47253 - DNA, 50 bp, synthetic construct
  source 1..50: mol_type = other DNA
acaaacttcaaaaaaaaaatcaactaacaaaacttcatacataaaaacca

SEQ ID NO: 47254 - DNA, 50 bp, synthetic construct
  source 1..50: mol_type = other DNA
acgaacttcaaaaaaaaaatcgactaacgaaacttcgtacgtaaaaaccg

SEQ ID NO: 47255 - DNA, 50 bp, synthetic construct
  source 1..50: mol_type = other DNA
aaccaaaccacaaacttcaaaaaaaaaatcaactaacaaaacttcataca

SEQ ID NO: 47256 - DNA, 50 bp, synthetic construct
  source 1..50: mol_type = other DNA
aaccaaaccacgaacttcaaaaaaaaaatcgactaacgaaacttcgtacg

SEQ ID NO: 47257 - DNA, 50 bp, synthetic construct
  source 1..50: mol_type = other DNA
aaaatcacaaaataaaactaaaaacaaatcctatacaattttcacacaca

SEQ ID NO: 47258 - DNA, 50 bp, synthetic construct
  source 1..50: mol_type = other DNA
aaaatcacaaaataaaactaaaaacaaatcctatacgattttcacgcacg

SEQ ID NO: 47259 - DNA, 50 bp, synthetic construct
  source 1..50: mol_type = other DNA
aactaaaaacaaatcctatacaattttcacacacaaaacctcaccaacca

SEQ ID NO: 47260 - DNA, 50 bp, synthetic construct
  source 1..50: mol_type = other DNA
aactaaaaacaaatcctatacgattttcacgcacgaaacctcgccaaccg

SEQ ID NO: 47261 - DNA, 50 bp, synthetic construct
  source 1..50: mol_type = other DNA
ccactacaacataataaccacacaaaaacaacaaaatcctaaaaaaaaca

SEQ ID NO: 47262 - DNA, 50 bp, synthetic construct
  source 1..50: mol_type = other DNA
ccgctacaacataataaccacgcgaaaacaacaaaatcctaaaaaaaacg

SEQ ID NO: 47263 - DNA, 50 bp, synthetic construct
  source 1..50: mol_type = other DNA
acaaacctaaaaaacacaaacactactaacatcaaacaaaaaaaacaaca

SEQ ID NO: 47264 - DNA, 50 bp, synthetic construct
  source 1..50: mol_type = other DNA
acaaacctaaaaaacacaaacactactaacatcgaacgaaaaaaacgacg

SEQ ID NO: 47265 - DNA, 50 bp, synthetic construct
  source 1..50: mol_type = other DNA
ataaacaaaaaacaaaaaccaataaaacactaaaactaaaaaatctctca

SEQ ID NO: 47266 - DNA, 50 bp, synthetic construct
  source 1..50: mol_type = other DNA
ataaacaaaaaacaaaaaccaataaaacgctaaaactaaaaaatctctcg

SEQ ID NO: 47267 - DNA, 50 bp, synthetic construct
  source 1..50: mol_type = other DNA
aaacaaaaaacaaaaaccaataaaacactaaaactaaaaaatctctcaca

SEQ ID NO: 47268 - DNA, 50 bp, synthetic construct
  source 1..50: mol_type = other DNA
aaacaaaaaacaaaaaccaataaaacgctaaaactaaaaaatctctcgcg

SEQ ID NO: 47269 - DNA, 50 bp, synthetic construct
  source 1..50: mol_type = other DNA
ttcaaccctaactaacaaaaaactaaacaacacctaaaaaaacaaaaaca

SEQ ID NO: 47270 - DNA, 50 bp, synthetic construct
  source 1..50: mol_type = other DNA
ttcaaccctaactaacaaaaaactaaacaacgcctaaaaaaacaaaaacg

SEQ ID NO: 47271 - DNA, 50 bp, synthetic construct
  source 1..50: mol_type = other DNA
cccaaaaaaaacatctatacctaacataaacaaaatctaaaaaaacatca

SEQ ID NO: 47272 - DNA, 50 bp, synthetic construct
  source 1..50: mol_type = other DNA
cccgaaaaaaacgtctatacctaacgtaaacaaaatctaaaaaaacgtcg

SEQ ID NO: 47273 - DNA, 50 bp, synthetic construct
  source 1..50: mol_type = other DNA
aaataacacaaacaatataaaaaccacatccaaaaaacaacctaaaacca

SEQ ID NO: 47274 - DNA, 50 bp, synthetic construct
  source 1..50: mol_type = other DNA
aaataacgcaaacgatataaaaaccgcatccgaaaaacgacctaaaaccg

SEQ ID NO: 47275 - DNA, 50 bp, synthetic construct
  source 1..50: mol_type = other DNA
aataatccaccaccaacaaccaaaactttaataaccactaaaaatttaca

SEQ ID NO: 47276 - DNA, 50 bp, synthetic construct
  source 1..50: mol_type = other DNA
aataatccgccgccgacaaccgaaactttaataaccgctaaaaatttacg

SEQ ID NO: 47277 - DNA, 50 bp, synthetic construct
  source 1..50: mol_type = other DNA
taaaaaaaaaaatattattaattcctcctcacaaaaaaaacataaaaaca

SEQ ID NO: 47278 - DNA, 50 bp, synthetic construct
  source 1..50: mol_type = other DNA
taaaaaaaaaaatattattaattcctcctcacaaaaaaaacgtaaaaacg

SEQ ID NO: 47279 - DNA, 50 bp, synthetic construct
  source 1..50: mol_type = other DNA
cttcccatctcttccctaataaccccaaaaataaaaataaacccaaatca

SEQ ID NO: 47280 - DNA, 50 bp, synthetic construct
  source 1..50: mol_type = other DNA
cttcccgtctcttccctaataaccccgaaaataaaaataaacccaaatcg

SEQ ID NO: 47281 - DNA, 50 bp, synthetic construct
  source 1..50: mol_type = other DNA
caaaaaaacaaaacaaaactcaaaatacaatcaaaaacataaccaaaaca

SEQ ID NO: 47282 - DNA, 50 bp, synthetic construct
  source 1..50: mol_type = other DNA
cgaaaaaacgaaacaaaactcgaaatacgatcgaaaacgtaaccgaaacg

SEQ ID NO: 47283 - DNA, 50 bp, synthetic construct
  source 1..50: mol_type = other DNA
aaactcctacccaaccaaaatatatcaaacaaaacacaaaacaacctcca

SEQ ID NO: 47284 - DNA, 50 bp, synthetic construct
  source 1..50: mol_type = other DNA
aaactcctacccaaccaaaatatatcgaacaaaacgcaaaacaacctccg

SEQ ID NO: 47285 - DNA, 50 bp, synthetic construct
  source 1..50: mol_type = other DNA
aaaaaaactcactacacaataaaaacaccccataaaaaataatccaaaca

SEQ ID NO: 47286 - DNA, 50 bp, synthetic construct
  source 1..50: mol_type = other DNA
gaaaaaactcgctacgcaataaaaacaccccgtaaaaaataatccgaacg

SEQ ID NO: 47287 - DNA, 50 bp, synthetic construct
  source 1..50: mol_type = other DNA
aaaaaaaaccaaatcaacaaaaactaaaaaccaccaattaacaacctaca

SEQ ID NO: 47288 - DNA, 50 bp, synthetic construct
  source 1..50: mol_type = other DNA
aaaaaaaaccgaatcgacgaaaactaaaaaccaccaattaacgacctacg

SEQ ID NO: 47289 - DNA, 50 bp, synthetic construct
  source 1..50: mol_type = other DNA
cccaccacaaaaacccaaaaccctaaaaaaaacaaaactaacaaataaca

SEQ ID NO: 47290 - DNA, 50 bp, synthetic construct
  source 1..50: mol_type = other DNA
cccgccgcaaaaacccgaaaccctaaaaaaaacgaaactaacaaataacg

SEQ ID NO: 47291 - DNA, 50 bp, synthetic construct
  source 1..50: mol_type = other DNA
aaaaataataactaaaaaaaactacacaactactacccaaattaatccca

SEQ ID NO: 47292 - DNA, 50 bp, synthetic construct
  source 1..50: mol_type = other DNA
aaaaataataactaaaaaaaactacacgactactacccgaattaatcccg

SEQ ID NO: 47293 - DNA, 50 bp, synthetic construct
  source 1..50: mol_type = other DNA
aacacccttatataccaaaaattcaaacctaattaaaaactaaaaacaca

SEQ ID NO: 47294 - DNA, 50 bp, synthetic construct
  source 1..50: mol_type = other DNA
aacgcccttatataccgaaaattcgaacctaattaaaaactaaaaacgcg

SEQ ID NO: 47295 - DNA, 50 bp, synthetic construct
  source 1..50: mol_type = other DNA
aaacactcccatcctccacacaaccaaaaacttcatacattattcaaaca

SEQ ID NO: 47296 - DNA, 50 bp, synthetic construct
  source 1..50: mol_type = other DNA
aaacgctcccatcctccacgcaaccaaaaacttcatacattattcaaacg

SEQ ID NO: 47297 - DNA, 50 bp, synthetic construct
  source 1..50: mol_type = other DNA
ccctcctacaaaaaacaaacaccaaataaaactacatataaacacataca

SEQ ID NO: 47298 - DNA, 50 bp, synthetic construct
  source 1..50: mol_type = other DNA
ccctcctacgaaaaacaaacaccgaataaaactacatataaacgcatacg

SEQ ID NO: 47299 - DNA, 50 bp, synthetic construct
  source 1..50: mol_type = other DNA
caaacaccaaataaaactacatataaacacatacaaaaataaaaactaca

SEQ ID NO: 47300 - DNA, 50 bp, synthetic construct
  source 1..50: mol_type = other DNA
caaacaccgaataaaactacatataaacgcatacgaaaataaaaactacg

SEQ ID NO: 47301 - DNA, 50 bp, synthetic construct
  source 1..50: mol_type = other DNA
acaccaaataaaactacatataaacacatacaaaaataaaaactacaaca

SEQ ID NO: 47302 - DNA, 50 bp, synthetic construct
  source 1..50: mol_type = other DNA
acaccgaataaaactacatataaacgcatacgaaaataaaaactacgacg

SEQ ID NO: 47303 - DNA, 50 bp, synthetic construct
  source 1..50: mol_type = other DNA
ataaaactacatataaacacatacaaaaataaaaactacaacaaaaaaca

SEQ ID NO: 47304 - DNA, 50 bp, synthetic construct
  source 1..50: mol_type = other DNA
ataaaactacatataaacgcatacgaaaataaaaactacgacgaaaaacg

SEQ ID NO: 47305 - DNA, 50 bp, synthetic construct
  source 1..50: mol_type = other DNA
catataaacacatacaaaaataaaaactacaacaaaaaacactaatcaca

SEQ ID NO: 47306 - DNA, 50 bp, synthetic construct
  source 1..50: mol_type = other DNA
catataaacgcatacgaaaataaaaactacgacgaaaaacgctaatcgcg

SEQ ID NO: 47307 - DNA, 50 bp, synthetic construct
  source 1..50: mol_type = other DNA
atacaaaaataaaaactacaacaaaaaacactaatcacaaaatacaaaca

SEQ ID NO: 47308 - DNA, 50 bp, synthetic construct
  source 1..50: mol_type = other DNA
atacgaaaataaaaactacgacgaaaaacgctaatcgcgaaatacaaacg

SEQ ID NO: 47309 - DNA, 50 bp, synthetic construct
  source 1..50: mol_type = other DNA
acaaaaaacactaatcacaaaatacaaacaaaaaccccaaaaaaatccca

SEQ ID NO: 47310 - DNA, 50 bp, synthetic construct
  source 1..50: mol_type = other DNA
acgaaaaacgctaatcgcgaaatacaaacgaaaaccccaaaaaaatcccg

SEQ ID NO: 47311 - DNA, 50 bp, synthetic construct
  source 1..50: mol_type = other DNA
caatacacccaaaataacacatactacaaactaaacaaaaacaaccacca

SEQ ID NO: 47312 - DNA, 50 bp, synthetic construct
  source 1..50: mol_type = other DNA
caatacgcccaaaataacacgtactacgaactaaacaaaaacaaccaccg

SEQ ID NO: 47313 - DNA, 50 bp, synthetic construct
  source 1..50: mol_type = other DNA
aaaaaaaaaaccttcaaaaaaacaatacacccaaaataacacatactaca

SEQ ID NO: 47314 - DNA, 50 bp, synthetic construct
  source 1..50: mol_type = other DNA
aaaaaaaaaaccttcgaaaaaacaatacgcccaaaataacacgtactacg

SEQ ID NO: 47315 - DNA, 50 bp, synthetic construct
  source 1..50: mol_type = other DNA
acacaaatcacctcccacacctataaaaacttcaaaaaatcccaaaatca

SEQ ID NO: 47316 - DNA, 50 bp, synthetic construct
  source 1..50: mol_type = other DNA
acacaaatcacctcccacgcctataaaaacttcaaaaaatcccgaaatcg

SEQ ID NO: 47317 - DNA, 50 bp, synthetic construct
  source 1..50: mol_type = other DNA
ataaaataaatctaaataaaatctaaaatacaaccaaaccattaataaca

SEQ ID NO: 47318 - DNA, 50 bp, synthetic construct
  source 1..50: mol_type = other DNA
gtaaaataaatctaaataaaatctaaaatacaaccaaaccgttaataacg

SEQ ID NO: 47319 - DNA, 50 bp, synthetic construct
  source 1..50: mol_type = other DNA
taccaataactcctatcacctacacttcccaaataacaaccaaacttcca

SEQ ID NO: 47320 - DNA, 50 bp, synthetic construct
  source 1..50: mol_type = other DNA
taccaataactcctatcacctacacttcccaaataacgaccaaacttccg

SEQ ID NO: 47321 - DNA, 50 bp, synthetic construct
  source 1..50: mol_type = other DNA
ctaaacacaaacaatccctaaaaaacaaaatccctaacataaaaccccca

SEQ ID NO: 47322 - DNA, 50 bp, synthetic construct
  source 1..50: mol_type = other DNA
ctaaacacgaacaatccctaaaaaacgaaatccctaacgtaaaacccccg

SEQ ID NO: 47323 - DNA, 50 bp, synthetic construct
  source 1..50: mol_type = other DNA
aaacaaaactaccaacttcacttaaaaaaaatacaaacaaaaccaaccca

SEQ ID NO: 47324 - DNA, 50 bp, synthetic construct
  source 1..50: mol_type = other DNA
aaacgaaactaccgacttcgcttaaaaaaaatacgaacaaaaccgacccg

SEQ ID NO: 47325 - DNA, 50 bp, synthetic construct
  source 1..50: mol_type = other DNA
caaacaaacaaaactaccaacttcacttaaaaaaaatacaaacaaaacca

SEQ ID NO: 47326 - DNA, 50 bp, synthetic construct
  source 1..50: mol_type = other DNA
cgaacaaacgaaactaccgacttcgcttaaaaaaaatacgaacaaaaccg

SEQ ID NO: 47327 - DNA, 50 bp, synthetic construct
  source 1..50: mol_type = other DNA
acaaaatcaacaatttcatttactcaattaattttaaaatcttaaatcca

SEQ ID NO: 47328 - DNA, 50 bp, synthetic construct
  source 1..50: mol_type = other DNA
acgaaatcgacaatttcgtttactcgattaattttaaaatcttaaatccg

SEQ ID NO: 47329 - DNA, 50 bp, synthetic construct
  source 1..50: mol_type = other DNA
acaatttcatttactcaattaattttaaaatcttaaatccataaatacca

SEQ ID NO: 47330 - DNA, 50 bp, synthetic construct
  source 1..50: mol_type = other DNA
acaatttcgtttactcgattaattttaaaatcttaaatccgtaaataccg

SEQ ID NO: 47331 - DNA, 50 bp, synthetic construct
  source 1..50: mol_type = other DNA
catttactcaattaattttaaaatcttaaatccataaataccacaactca

SEQ ID NO: 47332 - DNA, 50 bp, synthetic construct
  source 1..50: mol_type = other DNA
cgtttactcgattaattttaaaatcttaaatccgtaaataccgcgactcg

SEQ ID NO: 47333 - DNA, 50 bp, synthetic construct
  source 1..50: mol_type = other DNA
aatcttaaatccataaataccacaactcaatctaaaacacaacaaaaaca

SEQ ID NO: 47334 - DNA, 50 bp, synthetic construct
  source 1..50: mol_type = other DNA
aatcttaaatccgtaaataccgcgactcgatctaaaacacgacgaaaacg

SEQ ID NO: 47335 - DNA, 50 bp, synthetic construct
  source 1..50: mol_type = other DNA
actttacattacaaatcacactcccaaaccaaaacaacaaaaataaatca

SEQ ID NO: 47336 - DNA, 50 bp, synthetic construct
  source 1..50: mol_type = other DNA
actttacattacaaatcgcgctcccgaaccgaaacgacaaaaataaatcg

SEQ ID NO: 47337 - DNA, 50 bp, synthetic construct
  source 1..50: mol_type = other DNA
aaatactaaaaacaaaataactttacattacaaatcacactcccaaacca

SEQ ID NO: 47338 - DNA, 50 bp, synthetic construct
  source 1..50: mol_type = other DNA
aaatactaaaaacgaaataactttacattacaaatcgcgctcccgaaccg

SEQ ID NO: 47339 - DNA, 50 bp, synthetic construct
  source 1..50: mol_type = other DNA
aaaacaaattaaaatactaaaaacaaaataactttacattacaaatcaca

SEQ ID NO: 47340 - DNA, 50 bp, synthetic construct
  source 1..50: mol_type = other DNA
aaaacaaattaaaatactaaaaacgaaataactttacattacaaatcgcg

SEQ ID NO: 47341 - DNA, 50 bp, synthetic construct
  source 1..50: mol_type = other DNA
cccatacaaaaccaacatttatttatccaaaattacaaaacttcccctca

SEQ ID NO: 47342 - DNA, 50 bp, synthetic construct
  source 1..50: mol_type = other DNA
cccgtacaaaaccgacgtttatttatccgaaattacaaaacttcccctcg

SEQ ID NO: 47343 - DNA, 50 bp, synthetic construct
  source 1..50: mol_type = other DNA
tttcccccaaaatttttcaaacccatacaaaaccaacatttatttatcca

SEQ ID NO: 47344 - DNA, 50 bp, synthetic construct
  source 1..50: mol_type = other DNA
tttcccccaaaatttttcaaacccgtacaaaaccgacgtttatttatccg

SEQ ID NO: 47345 - DNA, 50 bp, synthetic construct
  source 1..50: mol_type = other DNA
taacttcaatttcactcactcttcatttcccccaaaatttttcaaaccca

SEQ ID NO: 47346 - DNA, 50 bp, synthetic construct
  source 1..50: mol_type = other DNA
taacttcgatttcgctcactcttcatttcccccaaaatttttcaaacccg

SEQ ID NO: 47347 - DNA, 50 bp, synthetic construct
  source 1..50: mol_type = other DNA
cctcataaatcaaaaacactcaataaccccctaaccaactaaaaaaatca

SEQ ID NO: 47348 - DNA, 50 bp, synthetic construct
  source 1..50: mol_type = other DNA
cctcataaatcgaaaacgctcaataaccccctaaccaactaaaaaaatcg

SEQ ID NO: 47349 - DNA, 50 bp, synthetic construct
  source 1..50: mol_type = other DNA
tcaaaaacactcaataaccccctaaccaactaaaaaaatcaaataactca

SEQ ID NO: 47350 - DNA, 50 bp, synthetic construct
  source 1..50: mol_type = other DNA
tcgaaaacgctcaataaccccctaaccaactaaaaaaatcgaataactcg

SEQ ID NO: 47351 - DNA, 50 bp, synthetic construct
  source 1..50: mol_type = other DNA
aaaaacactcaataaccccctaaccaactaaaaaaatcaaataactcaca

SEQ ID NO: 47352 - DNA, 50 bp, synthetic construct
  source 1..50: mol_type = other DNA
gaaaacgctcaataaccccctaaccaactaaaaaaatcgaataactcgcg

SEQ ID NO: 47353 - DNA, 50 bp, synthetic construct
  source 1..50: mol_type = other DNA
aaacaaaaaaacacaaaaaaacaaaacaacaaccaaaataatccctaaca

SEQ ID NO: 47354 - DNA, 50 bp, synthetic construct
  source 1..50: mol_type = other DNA
aaacgaaaaaacgcgaaaaaacgaaacgacgaccgaaataatccctaacg

SEQ ID NO: 47355 - DNA, 50 bp, synthetic construct
  source 1..50: mol_type = other DNA
aaaactaaacaaaataaaaacactacactcaaccataaaatacatccaca

SEQ ID NO: 47356 - DNA, 50 bp, synthetic construct
  source 1..50: mol_type = other DNA
aaaactaaacaaaataaaaacgctacgctcaaccgtaaaatacatccgcg

SEQ ID NO: 47357 - DNA, 50 bp, synthetic construct
  source 1..50: mol_type = other DNA
aacacataccacacaacaacaccaacaaaaaactaaacaaaataaaaaca

SEQ ID NO: 47358 - DNA, 50 bp, synthetic construct
  source 1..50: mol_type = other DNA
aacacgtaccgcacgacgacgccaacaaaaaactaaacaaaataaaaacg

SEQ ID NO: 47359 - DNA, 50 bp, synthetic construct
  source 1..50: mol_type = other DNA
acataaaactaataaacttaaacttccaaacactacaacaacacatacca

SEQ ID NO: 47360 - DNA, 50 bp, synthetic construct
  source 1..50: mol_type = other DNA
gcgtaaaactaataaacttaaacttccaaacgctacgacaacacgtaccg

SEQ ID NO: 47361 - DNA, 50 bp, synthetic construct
  source 1..50: mol_type = other DNA
caaccacataaaactaataaacttaaacttccaaacactacaacaacaca

SEQ ID NO: 47362 - DNA, 50 bp, synthetic construct
  source 1..50: mol_type = other DNA
caaccgcgtaaaactaataaacttaaacttccaaacgctacgacaacacg

SEQ ID NO: 47363 - DNA, 50 bp, synthetic construct
  source 1..50: mol_type = other DNA
aaccacaaaaccttccaaaaactcaacttcctataccaaataaatctaca

SEQ ID NO: 47364 - DNA, 50 bp, synthetic construct
  source 1..50: mol_type = other DNA
aaccgcgaaaccttccaaaaactcaacttcctataccaaataaatctacg

SEQ ID NO: 47365 - DNA, 50 bp, synthetic construct
  source 1..50: mol_type = other DNA
aattctacttccactttaataactccttctacctcaaaaacccactttca

SEQ ID NO: 47366 - DNA, 50 bp, synthetic construct
  source 1..50: mol_type = other DNA
aattctacttccgctttaataactccttctacctcaaaaacccgctttcg

SEQ ID NO: 47367 - DNA, 50 bp, synthetic construct
  source 1..50: mol_type = other DNA
aatcttcaaatctcccttcactatcaacacaacactaaattctacttcca

SEQ ID NO: 47368 - DNA, 50 bp, synthetic construct
  source 1..50: mol_type = other DNA
aatcttcaaatctcccttcactatcgacacgacactaaattctacttccg

SEQ ID NO: 47369 - DNA, 50 bp, synthetic construct
  source 1..50: mol_type = other DNA
ttcccaacaccaccacaaaaaaactattacaaaaaactaaaatcacccca

SEQ ID NO: 47370 - DNA, 50 bp, synthetic construct
  source 1..50: mol_type = other DNA
ttcccaacaccaccacaaaaaaactattacgaaaaactaaaatcaccccg

SEQ ID NO: 47371 - DNA, 50 bp, synthetic construct
  source 1..50: mol_type = other DNA
tccaaaccaaaatcaatttattcccaattcctactccatctaaaatctca

SEQ ID NO: 47372 - DNA, 50 bp, synthetic construct
  source 1..50: mol_type = other DNA
tccaaaccaaaatcaatttattcccaattcctactccgtctaaaatctcg

SEQ ID NO: 47373 - DNA, 50 bp, synthetic construct
  source 1..50: mol_type = other DNA
tacaacactccaaaacctactcaaaataaatcaaaaaaataaaaacaaca

SEQ ID NO: 47374 - DNA, 50 bp, synthetic construct
  source 1..50: mol_type = other DNA
tacaacactccaaaacctactcaaaataaatcgaaaaaataaaaacaacg

SEQ ID NO: 47375 - DNA, 50 bp, synthetic construct
  source 1..50: mol_type = other DNA
caaaatcacataaccataacacccaaaaaaacaaaatcacataactatca

SEQ ID NO: 47376 - DNA, 50 bp, synthetic construct
  source 1..50: mol_type = other DNA
cgaaatcacataaccgtaacacccaaaaaaacgaaatcacgtaactatcg

SEQ ID NO: 47377 - DNA, 50 bp, synthetic construct
  source 1..50: mol_type = other DNA
cccaaaaaaacaaaatcacataactatcactattatcacaaaacctacca

SEQ ID NO: 47378 - DNA, 50 bp, synthetic construct
  source 1..50: mol_type = other DNA
cccaaaaaaacgaaatcacgtaactatcgctattatcgcgaaacctaccg

SEQ ID NO: 47379 - DNA, 50 bp, synthetic construct
  source 1..50: mol_type = other DNA
gttgtgtttgttttgatttgtgtttattgttgtagtattataattgaaat

SEQ ID NO: 47380 - DNA, 50 bp, synthetic construct
  source 1..50: mol_type = other DNA
gtcgcgttcgttttgattcgcgtttattgtcgtagtattataatcgaaac

SEQ ID NO: 47381 - DNA, 50 bp, synthetic construct
  source 1..50: mol_type = other DNA
tctaaaatctcaaaatttaatcatccaaccaccacatccatcttaatcca

SEQ ID NO: 47382 - DNA, 50 bp, synthetic construct
  source 1..50: mol_type = other DNA
tctaaaatctcgaaatttaatcatccaaccgccgcgtccgtcttaatccg

SEQ ID NO: 47383 - DNA, 50 bp, synthetic construct
  source 1..50: mol_type = other DNA
atccctcaatatccatttttcctttctcccacaatcataaaatttcccca

SEQ ID NO: 47384 - DNA, 50 bp, synthetic construct
  source 1..50: mol_type = other DNA
atccctcaatatccatttttcctttctcccacaatcataaaatttccccg

SEQ ID NO: 47385 - DNA, 50 bp, synthetic construct
  source 1..50: mol_type = other DNA
catcactcaaaacaaattctattttcaaaacaaaaccaataaccaattca

SEQ ID NO: 47386 - DNA, 50 bp, synthetic construct
  source 1..50: mol_type = other DNA
catcactcgaaacaaattctattttcaaaacgaaaccgataaccgattcg

SEQ ID NO: 47387 - DNA, 50 bp, synthetic construct
  source 1..50: mol_type = other DNA
acctacatcactcaaaacaaattctattttcaaaacaaaaccaataacca

SEQ ID NO: 47388 - DNA, 50 bp, synthetic construct
  source 1..50: mol_type = other DNA
acctacatcactcgaaacaaattctattttcaaaacgaaaccgataaccg

SEQ ID NO: 47389 - DNA, 50 bp, synthetic construct
  source 1..50: mol_type = other DNA
ctcccttacctacatcactcaaaacaaattctattttcaaaacaaaacca

SEQ ID NO: 47390 - DNA, 50 bp, synthetic construct
  source 1..50: mol_type = other DNA
ctcccttacctacatcactcgaaacaaattctattttcaaaacgaaaccg

SEQ ID NO: 47391 - DNA, 50 bp, synthetic construct
  source 1..50: mol_type = other DNA
tttattggtgaattggttattggttttgttttgaaaatagaatttgtttt

SEQ ID NO: 47392 - DNA, 50 bp, synthetic construct
  source 1..50: mol_type = other DNA
tttattggcgaatcggttatcggtttcgttttgaaaatagaatttgtttc

SEQ ID NO: 47393 - DNA, 50 bp, synthetic construct
  source 1..50: mol_type = other DNA
aagggagggatttgttttagtgagttagagttataagaatgagagtatgt

SEQ ID NO: 47394 - DNA, 50 bp, synthetic construct
  source 1..50: mol_type = other DNA
aagggagggattcgttttagtgagttagagttataagaatgagagtatgc

SEQ ID NO: 47395 - DNA, 50 bp, synthetic construct
  source 1..50: mol_type = other DNA
ctattaacaatttcacacatcacccttaacaaaataaaaataaacaaaca

SEQ ID NO: 47396 - DNA, 50 bp, synthetic construct
  source 1..50: mol_type = other DNA
ctattaacaatttcacacatcacccttaacgaaataaaaataaacgaacg

SEQ ID NO: 47397 - DNA, 50 bp, synthetic construct
  source 1..50: mol_type = other DNA
aaaccaaaaacaaaaatcaactacaaatctcccattatataaaaaaaaca

SEQ ID NO: 47398 - DNA, 50 bp, synthetic construct
  source 1..50: mol_type = other DNA
aaaccgaaaacgaaaatcgactacaaatctcccgttatataaaaaaaacg

SEQ ID NO: 47399 - DNA, 50 bp, synthetic construct
  source 1..50: mol_type = other DNA
aacaaaaatcaactacaaatctcccattatataaaaaaaacacaaacaca

SEQ ID NO: 47400 - DNA, 50 bp, synthetic construct
  source 1..50: mol_type = other DNA
aacgaaaatcgactacaaatctcccgttatataaaaaaaacgcaaacacg

SEQ ID NO: 47401 - DNA, 50 bp, synthetic construct
  source 1..50: mol_type = other DNA
tgtgagagaaatgtaagtatggagtttttttgatttgttgtatttttttt

SEQ ID NO: 47402 - DNA, 50 bp, synthetic construct
  source 1..50: mol_type = other DNA
tgtgagagaaacgtaagtacggagtttttttgatttgttgtatttttttc

SEQ ID NO: 47403 - DNA, 50 bp, synthetic construct
  source 1..50: mol_type = other DNA
tttttttagtgtgagttaataaatgttttggttgtggagtttttatagtt

SEQ ID NO: 47404 - DNA, 50 bp, synthetic construct
  source 1..50: mol_type = other DNA
tttttttagcgcgagttaataaacgtttcggtcgcggagtttttatagtc

SEQ ID NO: 47405 - DNA, 50 bp, synthetic construct
  source 1..50: mol_type = other DNA
gggttttgtttagttttggtttttttttagtgtgagttaataaatgtttt

SEQ ID NO: 47406 - DNA, 50 bp, synthetic construct
  source 1..50: mol_type = other DNA
gggtttcgtttagtttcggtttttttttagcgcgagttaataaacgtttc

SEQ ID NO: 47407 - DNA, 50 bp, synthetic construct
  source 1..50: mol_type = other DNA
agatggggttttgtttagttttggtttttttttagtgtgagttaataaat

SEQ ID NO: 47408 - DNA, 50 bp, synthetic construct
  source 1..50: mol_type = other DNA
agatggggtttcgtttagtttcggtttttttttagcgcgagttaataaac

SEQ ID NO: 47409 - DNA, 50 bp, synthetic construct
  source 1..50: mol_type = other DNA
attttctcaccaaaaaaaaataaacaacctaaataattctccccatcaca

SEQ ID NO: 47410 - DNA, 50 bp, synthetic construct
  source 1..50: mol_type = other DNA
attttctcaccgaaaaaaaataaacgacctaaataattctccccgtcgcg

SEQ ID NO: 47411 - DNA, 50 bp, synthetic construct
  source 1..50: mol_type = other DNA
aaattttctcaccaaaaaaaaataaacaacctaaataattctccccatca

SEQ ID NO: 47412 - DNA, 50 bp, synthetic construct
  source 1..50: mol_type = other DNA
aaattttctcaccgaaaaaaaataaacgacctaaataattctccccgtcg

SEQ ID NO: 47413 - DNA, 50 bp, synthetic construct
  source 1..50: mol_type = other DNA
aaaaaattttctcaccaaaaaaaaataaacaacctaaataattctcccca

SEQ ID NO: 47414 - DNA, 50 bp, synthetic construct
  source 1..50: mol_type = other DNA
aaaaaattttctcaccgaaaaaaaataaacgacctaaataattctccccg

SEQ ID NO: 47415 - DNA, 50 bp, synthetic construct
  source 1..50: mol_type = other DNA
ctaaacaaaacacaacaaaaaaaaccatccaaatcactcatttctctcca

SEQ ID NO: 47416 - DNA, 50 bp, synthetic construct
  source 1..50: mol_type = other DNA
ctaaacaaaacgcgacgaaaaaaaccatccaaatcgctcatttctctccg

SEQ ID NO: 47417 - DNA, 50 bp, synthetic construct
  source 1..50: mol_type = other DNA
aaaaaaaccatccaaatcactcatttctctccaataaaaaaacttcctca

SEQ ID NO: 47418 - DNA, 50 bp, synthetic construct
  source 1..50: mol_type = other DNA
aaaaaaaccatccaaatcgctcatttctctccgataaaaaaacttcctcg

SEQ ID NO: 47419 - DNA, 50 bp, synthetic construct
  source 1..50: mol_type = other DNA
atccaaatcactcatttctctccaataaaaaaacttcctcaaaaaaacca

SEQ ID NO: 47420 - DNA, 50 bp, synthetic construct
  source 1..50: mol_type = other DNA
atccaaatcgctcatttctctccgataaaaaaacttcctcgaaaaaaccg

SEQ ID NO: 47421 - DNA, 50 bp, synthetic construct
  source 1..50: mol_type = other DNA
tccaataaaaaaacttcctcaaaaaaaccaaaaactttttcctaaacaca

SEQ ID NO: 47422 - DNA, 50 bp, synthetic construct
  source 1..50: mol_type = other DNA
tccgataaaaaaacttcctcgaaaaaaccgaaaactttttcctaaacgcg

SEQ ID NO: 47423 - DNA, 50 bp, synthetic construct
  source 1..50: mol_type = other DNA
caataaaaaaacttcctcaaaaaaaccaaaaactttttcctaaacacaca

SEQ ID NO: 47424 - DNA, 50 bp, synthetic construct
  source 1..50: mol_type = other DNA
cgataaaaaaacttcctcgaaaaaaccgaaaactttttcctaaacgcgcg

SEQ ID NO: 47425 - DNA, 50 bp, synthetic construct
  source 1..50: mol_type = other DNA
ttcctcaaaaaaaccaaaaactttttcctaaacacacaaaatctaaaaca

SEQ ID NO: 47426 - DNA, 50 bp, synthetic construct
  source 1..50: mol_type = other DNA
ttcctcgaaaaaaccgaaaactttttcctaaacgcgcgaaatctaaaacg

SEQ ID NO: 47427 - DNA, 50 bp, synthetic construct
  source 1..50: mol_type = other DNA
aaaaaaaccaaaaactttttcctaaacacacaaaatctaaaacaaaaaca

SEQ ID NO: 47428 - DNA, 50 bp, synthetic construct
  source 1..50: mol_type = other DNA
gaaaaaaccgaaaactttttcctaaacgcgcgaaatctaaaacgaaaacg

SEQ ID NO: 47429 - DNA, 50 bp, synthetic construct
  source 1..50: mol_type = other DNA
aaaccaaaaactttttcctaaacacacaaaatctaaaacaaaaacaaaca

SEQ ID NO: 47430 - DNA, 50 bp, synthetic construct
  source 1..50: mol_type = other DNA
aaaccgaaaactttttcctaaacgcgcgaaatctaaaacgaaaacgaacg

SEQ ID NO: 47431 - DNA, 50 bp, synthetic construct
  source 1..50: mol_type = other DNA
ccaaaaactttttcctaaacacacaaaatctaaaacaaaaacaaacaaca

SEQ ID NO: 47432 - DNA, 50 bp, synthetic construct
  source 1..50: mol_type = other DNA
ccgaaaactttttcctaaacgcgcgaaatctaaaacgaaaacgaacgacg

SEQ ID NO: 47433 - DNA, 50 bp, synthetic construct
  source 1..50: mol_type = other DNA
tttttcctaaacacacaaaatctaaaacaaaaacaaacaacaaatataca

SEQ ID NO: 47434 - DNA, 50 bp, synthetic construct
  source 1..50: mol_type = other DNA
tttttcctaaacgcgcgaaatctaaaacgaaaacgaacgacgaatatacg

SEQ ID NO: 47435 - DNA, 50 bp, synthetic construct
  source 1..50: mol_type = other DNA
tttcctaaacacacaaaatctaaaacaaaaacaaacaacaaatatacaca

SEQ ID NO: 47436 - DNA, 50 bp, synthetic construct
  source 1..50: mol_type = other DNA
tttcctaaacgcgcgaaatctaaaacgaaaacgaacgacgaatatacgcg

SEQ ID NO: 47437 - DNA, 50 bp, synthetic construct
  source 1..50: mol_type = other DNA
taaaacaaaaacaaacaacaaatatacacaactcaaaataattcacacca

SEQ ID NO: 47438 - DNA, 50 bp, synthetic construct
  source 1..50: mol_type = other DNA
taaaacgaaaacgaacgacgaatatacgcgactcgaaataattcacgccg

SEQ ID NO: 47439 - DNA, 50 bp, synthetic construct
  source 1..50: mol_type = other DNA
tttaattttgtgtggttgttgagtttatgattttggttttttttagagat

SEQ ID NO: 47440 - DNA, 50 bp, synthetic construct
  source 1..50: mol_type = other DNA
tttaattttgcgcggttgttgagtttatgatttcggttttttttagagac

SEQ ID NO: 47441 - DNA, 50 bp, synthetic construct
  source 1..50: mol_type = other DNA
tgtgtggtaatttttgtttaattttgtgtggttgttgagtttatgatttt

SEQ ID NO: 47442 - DNA, 50 bp, synthetic construct
  source 1..50: mol_type = other DNA
cgcgcggtaattttcgtttaattttgcgcggttgttgagtttatgatttc

SEQ ID NO: 47443 - DNA, 50 bp, synthetic construct
  source 1..50: mol_type = other DNA
taaataaaaaacatctctaaaaaaaaccaaaatcataaactcaacaacca

SEQ ID NO: 47444 - DNA, 50 bp, synthetic construct
  source 1..50: mol_type = other DNA
taaataaaaaacgtctctaaaaaaaaccgaaatcataaactcaacaaccg

SEQ ID NO: 47445 - DNA, 50 bp, synthetic construct
  source 1..50: mol_type = other DNA
ccaaaatcataaactcaacaaccacacaaaattaaacaaaaattaccaca

SEQ ID NO: 47446 - DNA, 50 bp, synthetic construct
  source 1..50: mol_type = other DNA
ccgaaatcataaactcaacaaccgcgcaaaattaaacgaaaattaccgcg

SEQ ID NO: 47447 - DNA, 50 bp, synthetic construct
  source 1..50: mol_type = other DNA
gtttagtaattgtgtaggattgagtgaaaattattgtgtgttaatttgat

SEQ ID NO: 47448 - DNA, 50 bp, synthetic construct
  source 1..50: mol_type = other DNA
gtttagtaatcgcgtaggattgagcgaaaattatcgcgcgttaatttgac

SEQ ID NO: 47449 - DNA, 50 bp, synthetic construct
  source 1..50: mol_type = other DNA
caaccacacaaaattaaacaaaaattaccacacactaatctaacaaaaca

SEQ ID NO: 47450 - DNA, 50 bp, synthetic construct
  source 1..50: mol_type = other DNA
caaccgcgcaaaattaaacgaaaattaccgcgcgctaatctaacgaaacg

SEQ ID NO: 47451 - DNA, 50 bp, synthetic construct
  source 1..50: mol_type = other DNA
aaattaaacaaaaattaccacacactaatctaacaaaacacaacataaca

SEQ ID NO: 47452 - DNA, 50 bp, synthetic construct
  source 1..50: mol_type = other DNA
aaattaaacgaaaattaccgcgcgctaatctaacgaaacgcgacgtaacg

SEQ ID NO: 47453 - DNA, 50 bp, synthetic construct
  source 1..50: mol_type = other DNA
aacataaaccaaatatcccaaaaaaatacaatttctaaaaatcctcacca

SEQ ID NO: 47454 - DNA, 50 bp, synthetic construct
  source 1..50: mol_type = other DNA
aacgtaaaccgaatatcccgaaaaaatacgatttctaaaaatcctcaccg

SEQ ID NO: 47455 - DNA, 50 bp, synthetic construct
  source 1..50: mol_type = other DNA
caaaaatcaaaaaatactctctcccaaaacaaaaaatctatcttccacca

SEQ ID NO: 47456 - DNA, 50 bp, synthetic construct
  source 1..50: mol_type = other DNA
cgaaaatcgaaaaatactctctcccaaaacgaaaaatctatcttccgccg

SEQ ID NO: 47457 - DNA, 50 bp, synthetic construct
  source 1..50: mol_type = other DNA
taacacataaaacaaattcaacaaatattaataaaacaaaacataaatca

SEQ ID NO: 47458 - DNA, 50 bp, synthetic construct
  source 1..50: mol_type = other DNA
taacacgtaaaacaaattcaacaaatattaataaaacgaaacataaatcg

SEQ ID NO: 47459 - DNA, 50 bp, synthetic construct
  source 1..50: mol_type = other DNA
tttttgggtttttaaagttaatttggtttttaattttatttattgggttt

SEQ ID NO: 47460 - DNA, 50 bp, synthetic construct
  source 1..50: mol_type = other DNA
tttttgggtttttaaagttaattcggtttttaattttatttattgggttc

SEQ ID NO: 47461 - DNA, 50 bp, synthetic construct
  source 1..50: mol_type = other DNA
ttgggtttttaaagttaatttggtttttaattttatttattgggtttgtt

SEQ ID NO: 47462 - DNA, 50 bp, synthetic construct
  source 1..50: mol_type = other DNA
ttgggtttttaaagttaattcggtttttaattttatttattgggttcgtc

SEQ ID NO: 47463 - DNA, 50 bp, synthetic construct
  source 1..50: mol_type = other DNA
gaatttggtatgtttatgtatatggtgaaaggggaggagagatttagagt

SEQ ID NO: 47464 - DNA, 50 bp, synthetic construct
  source 1..50: mol_type = other DNA
gaatttggtatgtttatgtatatggcgaaaggggaggagagatttagagc

SEQ ID NO: 47465 - DNA, 50 bp, synthetic construct
  source 1..50: mol_type = other DNA
gtttttaagtgttgtggtttttaggtttttaaatttgttttttaggtttt

SEQ ID NO: 47466 - DNA, 50 bp, synthetic construct
  source 1..50: mol_type = other DNA
gtttttaagcgttgtggtttttaggtttttaaatttgttttttaggtttc

SEQ ID NO: 47467 - DNA, 50 bp, synthetic construct
  source 1..50: mol_type = other DNA
accaaaaaattataaacatattataaacccaataaaaaaactataaccca

SEQ ID NO: 47468 - DNA, 50 bp, synthetic construct
  source 1..50: mol_type = other DNA
accgaaaaattataaacgtattataaacccaataaaaaaactataacccg

SEQ ID NO: 47469 - DNA, 50 bp, synthetic construct
  source 1..50: mol_type = other DNA
tttttagttttgtttattgggttatagtttttttattgggtttataatat

SEQ ID NO: 47470 - DNA, 50 bp, synthetic construct
  source 1..50: mol_type = other DNA
tttttagttttgtttatcgggttatagtttttttattgggtttataatac

SEQ ID NO: 47471 - DNA, 50 bp, synthetic construct
  source 1..50: mol_type = other DNA
gatttttatttgttatgttttagtatttttatgtggttggtgtaggtgtt

SEQ ID NO: 47472 - DNA, 50 bp, synthetic construct
  source 1..50: mol_type = other DNA
gatttttattcgttatgttttagtatttttacgcggtcggcgtaggcgtc

SEQ ID NO: 47473 - DNA, 50 bp, synthetic construct
  source 1..50: mol_type = other DNA
attgatttttatttgttatgttttagtatttttatgtggttggtgtaggt

SEQ ID NO: 47474 - DNA, 50 bp, synthetic construct
  source 1..50: mol_type = other DNA
attgatttttattcgttatgttttagtatttttacgcggtcggcgtaggc

SEQ ID NO: 47475 - DNA, 50 bp, synthetic construct
  source 1..50: mol_type = other DNA
ttgtatattgatttttatttgttatgttttagtatttttatgtggttggt

SEQ ID NO: 47476 - DNA, 50 bp, synthetic construct
  source 1..50: mol_type = other DNA
tcgtatattgatttttattcgttatgttttagtatttttacgcggtcggc

SEQ ID NO: 47477 - DNA, 50 bp, synthetic construct
  source 1..50: mol_type = other DNA
ttattgtatattgatttttatttgttatgttttagtatttttatgtggtt

SEQ ID NO: 47478 - DNA, 50 bp, synthetic construct
  source 1..50: mol_type = other DNA
ttatcgtatattgatttttattcgttatgttttagtatttttacgcggtc

SEQ ID NO: 47479 - DNA, 50 bp, synthetic construct
  source 1..50: mol_type = other DNA
agtgttattgtatattgatttttatttgttatgttttagtatttttatgt

SEQ ID NO: 47480 - DNA, 50 bp, synthetic construct
  source 1..50: mol_type = other DNA
agtgttatcgtatattgatttttattcgttatgttttagtatttttacgc

SEQ ID NO: 47481 - DNA, 50 bp, synthetic construct
  source 1..50: mol_type = other DNA
atgtgggtgttttttaggttttaagtgttattgtatattgatttttattt

SEQ ID NO: 47482 - DNA, 50 bp, synthetic construct
  source 1..50: mol_type = other DNA
acgtgggcgttttttaggttttaagtgttatcgtatattgatttttattc

SEQ ID NO: 47483 - DNA, 50 bp, synthetic construct
  source 1..50: mol_type = other DNA
acacaactttctctccacctctaaaacaaataaataaaaaacaaacccca

SEQ ID NO: 47484 - DNA, 50 bp, synthetic construct
  source 1..50: mol_type = other DNA
acgcgactttctctccacctctaaaacaaataaataaaaaacaaaccccg

SEQ ID NO: 47485 - DNA, 50 bp, synthetic construct
  source 1..50: mol_type = other DNA
aaacccaacactaccaaccacatcctataacaattaccctaaaaaacaca

SEQ ID NO: 47486 - DNA, 50 bp, synthetic construct
  source 1..50: mol_type = other DNA
aaacccaacactaccaaccacatcctataacgattaccctaaaaaacgcg

SEQ ID NO: 47487 - DNA, 50 bp, synthetic construct
  source 1..50: mol_type = other DNA
tttagagggtttgaggagggggtttaatattgttaattatattttgtgat

SEQ ID NO: 47488 - DNA, 50 bp, synthetic construct
  source 1..50: mol_type = other DNA
tttagagggttcgaggagggggtttaatattgttaattatattttgtgac

SEQ ID NO: 47489 - DNA, 50 bp, synthetic construct
  source 1..50: mol_type = other DNA
ccaaaacaaccatcacaaaatataattaacaatattaaaccccctcctca

SEQ ID NO: 47490 - DNA, 50 bp, synthetic construct
  source 1..50: mol_type = other DNA
ccaaaacaaccgtcacaaaatataattaacaatattaaaccccctcctcg

SEQ ID NO: 47491 - DNA, 50 bp, synthetic construct
  source 1..50: mol_type = other DNA
aggaggggtggagtggggagttgaatataggtttttataagttttttgtt

SEQ ID NO: 47492 - DNA, 50 bp, synthetic construct
  source 1..50: mol_type = other DNA
aggaggggtggagtggggagttgaatataggtttttataagttttttgtc

SEQ ID NO: 47493 - DNA, 50 bp, synthetic construct
  source 1..50: mol_type = other DNA
aaaaccctaaataaaatataataacaacaacctctaaactaaaaaaatca

SEQ ID NO: 47494 - DNA, 50 bp, synthetic construct
  source 1..50: mol_type = other DNA
aaaaccctaaataaaatataataacaacaacctctaaactaaaaaaatcg

SEQ ID NO: 47495 - DNA, 50 bp, synthetic construct
  source 1..50: mol_type = other DNA
ttaagataaagagaaggtgggaagggaaatgtttaaggtaaataattttt

SEQ ID NO: 47496 - DNA, 50 bp, synthetic construct
  source 1..50: mol_type = other DNA
ttaagataaagagaaggcgggaagggaaatgtttaaggtaaataattttc

SEQ ID NO: 47497 - DNA, 50 bp, synthetic construct
  source 1..50: mol_type = other DNA
agaaggtgggaagggaaatgtttaaggtaaataatttttgagtagtattt

SEQ ID NO: 47498 - DNA, 50 bp, synthetic construct
  source 1..50: mol_type = other DNA
agaaggcgggaagggaaatgtttaaggtaaataattttcgagtagtattc

SEQ ID NO: 47499 - DNA, 50 bp, synthetic construct
  source 1..50: mol_type = other DNA
ccacactatattaacaataatttactccttttatattacaaaaaaataca

SEQ ID NO: 47500 - DNA, 50 bp, synthetic construct
  source 1..50: mol_type = other DNA
ccacactatattaacaataatttactccttttatattacaaaaaaatacg

SEQ ID NO: 47501 - DNA, 50 bp, synthetic construct
  source 1..50: mol_type = other DNA
cttttatattacaaaaaaatacaaatacacatataaatatacatatatca

SEQ ID NO: 47502 - DNA, 50 bp, synthetic construct
  source 1..50: mol_type = other DNA
cttttatattacaaaaaaatacgaatacacatataaatatacatatatcg

SEQ ID NO: 47503 - DNA, 50 bp, synthetic construct
  source 1..50: mol_type = other DNA
tttaaaaaataatttaacaatttcttaaacaattaaacatacacctacca

SEQ ID NO: 47504 - DNA, 50 bp, synthetic construct
  source 1..50: mol_type = other DNA
tttaaaaaataatttaacaatttcttaaacaattaaacatacacctaccg

SEQ ID NO: 47505 - DNA, 50 bp, synthetic construct
  source 1..50: mol_type = other DNA
taactatcttttaaaaatacttactaattaataaatcatctttaaacaca

SEQ ID NO: 47506 - DNA, 50 bp, synthetic construct
  source 1..50: mol_type = other DNA
taactatcttttaaaaatacttactaattaataaatcatctttaaacacg

SEQ ID NO: 47507 - DNA, 50 bp, synthetic construct
  source 1..50: mol_type = other DNA
acactaaaaatacaaaaataaataaacatcatcccaaaactaaatacaca

SEQ ID NO: 47508 - DNA, 50 bp, synthetic construct
  source 1..50: mol_type = other DNA
acactaaaaatacaaaaataaataaacatcatcccaaaactaaatacgcg

SEQ ID NO: 47509 - DNA, 50 bp, synthetic construct
  source 1..50: mol_type = other DNA
ccaaactttcctaaaaacacccacaacctctatacaaatctctaaccaca

SEQ ID NO: 47510 - DNA, 50 bp, synthetic construct
  source 1..50: mol_type = other DNA
ccaaactttcctaaaaacgcccacaacctctatacaaatctctaaccacg

SEQ ID NO: 47511 - DNA, 50 bp, synthetic construct
  source 1..50: mol_type = other DNA
atctctattatcaataatatattatctttatttaaaaaattcttctacca

SEQ ID NO: 47512 - DNA, 50 bp, synthetic construct
  source 1..50: mol_type = other DNA
atctctattatcgataatatattatctttatttaaaaaattcttctaccg

SEQ ID NO: 47513 - DNA, 50 bp, synthetic construct
  source 1..50: mol_type = other DNA
aactaaaaaatattcaaaattcaccccacacctctcacccttaaaaatca

SEQ ID NO: 47514 - DNA, 50 bp, synthetic construct
  source 1..50: mol_type = other DNA
aactaaaaaatattcaaaattcgccccacgcctctcgcccttaaaaatcg

SEQ ID NO: 47515 - DNA, 50 bp, synthetic construct
  source 1..50: mol_type = other DNA
ctaattaccataaaaacaaccatctaaaaaaacacaacctacactacaca

SEQ ID NO: 47516 - DNA, 50 bp, synthetic construct
  source 1..50: mol_type = other DNA
ctaattaccataaaaacaaccgtctaaaaaaacgcaacctacactacgcg

SEQ ID NO: 47517 - DNA, 50 bp, synthetic construct
  source 1..50: mol_type = other DNA
aacaaacaaatcacataacaaaaacacaaactttaaaaaacaactaaaca

SEQ ID NO: 47518 - DNA, 50 bp, synthetic construct
  source 1..50: mol_type = other DNA
aacgaacaaatcacgtaacgaaaacgcgaactttaaaaaacgactaaacg

SEQ ID NO: 47519 - DNA, 50 bp, synthetic construct
  source 1..50: mol_type = other DNA
acaactaaaacttaattcaaaattaccccaaacaaacaatcctaaactca

SEQ ID NO: 47520 - DNA, 50 bp, synthetic construct
  source 1..50: mol_type = other DNA
acgactaaaacttaattcgaaattaccccgaacaaacgatcctaaactcg

SEQ ID NO: 47521 - DNA, 50 bp, synthetic construct
  source 1..50: mol_type = other DNA
tccaactaacttcacctctcaaaactataaaacttccatcccttcttaca

SEQ ID NO: 47522 - DNA, 50 bp, synthetic construct
  source 1..50: mol_type = other DNA
tccaactaacttcacctctcaaaactataaaacttccgtcccttcttacg

SEQ ID NO: 47523 - DNA, 50 bp, synthetic construct
  source 1..50: mol_type = other DNA
taaaaactcaatcctaaaaactcaaaaatcaaaacattcccttcaccaca

SEQ ID NO: 47524 - DNA, 50 bp, synthetic construct
  source 1..50: mol_type = other DNA
taaaaactcaatcctaaaaactcgaaaatcgaaacgttcccttcaccgcg

SEQ ID NO: 47525 - DNA, 50 bp, synthetic construct
  source 1..50: mol_type = other DNA
cctaaaaactcaatcctaaaaactcaaaaatcaaaacattcccttcacca

SEQ ID NO: 47526 - DNA, 50 bp, synthetic construct
  source 1..50: mol_type = other DNA
cctaaaaactcaatcctaaaaactcgaaaatcgaaacgttcccttcaccg

SEQ ID NO: 47527 - DNA, 50 bp, synthetic construct
  source 1..50: mol_type = other DNA
aaaataacatacacttaacaaaaacccccaaaactattctcaaatcacca

SEQ ID NO: 47528 - DNA, 50 bp, synthetic construct
  source 1..50: mol_type = other DNA
aaaataacatacacttaacgaaaacccccaaaactattctcgaatcgccg

SEQ ID NO: 47529 - DNA, 50 bp, synthetic construct
  source 1..50: mol_type = other DNA
caaacaaccactaacatacataaaaaattaaaaataacatacacttaaca

SEQ ID NO: 47530 - DNA, 50 bp, synthetic construct
  source 1..50: mol_type = other DNA
caaacgaccgctaacgtacataaaaaattaaaaataacatacacttaacg

SEQ ID NO: 47531 - DNA, 50 bp, synthetic construct
  source 1..50: mol_type = other DNA
aaaatcctcactaaatatataccattcccaatcccttatatacaccaaca

SEQ ID NO: 47532 - DNA, 50 bp, synthetic construct
  source 1..50: mol_type = other DNA
aaaatcctcgctaaatatataccattcccaatcccttatatacgccaacg

SEQ ID NO: 47533 - DNA, 50 bp, synthetic construct
  source 1..50: mol_type = other DNA
ttaaaaacccctacatcatataaaaactaaaaaacacaaaaaaaacaaca

SEQ ID NO: 47534 - DNA, 50 bp, synthetic construct
  source 1..50: mol_type = other DNA
ttaaaaacccctacgtcgtataaaaactaaaaaacgcgaaaaaaacaacg

SEQ ID NO: 47535 - DNA, 50 bp, synthetic construct
  source 1..50: mol_type = other DNA
aaaaccactaccttaaaaacccctacatcatataaaaactaaaaaacaca

SEQ ID NO: 47536 - DNA, 50 bp, synthetic construct
  source 1..50: mol_type = other DNA
aaaaccgctaccttaaaaacccctacgtcgtataaaaactaaaaaacgcg

SEQ ID NO: 47537 - DNA, 50 bp, synthetic construct
  source 1..50: mol_type = other DNA
aaaaaaccactaccttaaaaacccctacatcatataaaaactaaaaaaca

SEQ ID NO: 47538 - DNA, 50 bp, synthetic construct
  source 1..50: mol_type = other DNA
aaaaaaccgctaccttaaaaacccctacgtcgtataaaaactaaaaaacg

SEQ ID NO: 47539 - DNA, 50 bp, synthetic construct
  source 1..50: mol_type = other DNA
actaaaacaaaaaacttaaaaaaaccactaccttaaaaacccctacatca

SEQ ID NO: 47540 - DNA, 50 bp, synthetic construct
  source 1..50: mol_type = other DNA
actaaaacgaaaaacttaaaaaaaccgctaccttaaaaacccctacgtcg

SEQ ID NO: 47541 - DNA, 50 bp, synthetic construct
  source 1..50: mol_type = other DNA
aaaactaaaacaaaaaacttaaaaaaaccactaccttaaaaacccctaca

SEQ ID NO: 47542 - DNA, 50 bp, synthetic construct
  source 1..50: mol_type = other DNA
aaaactaaaacgaaaaacttaaaaaaaccgctaccttaaaaacccctacg

SEQ ID NO: 47543 - DNA, 50 bp, synthetic construct
  source 1..50: mol_type = other DNA
tacctattacccaataattaaatatcctacaaatacaaaataaaaaaaca

SEQ ID NO: 47544 - DNA, 50 bp, synthetic construct
  source 1..50: mol_type = other DNA
tacctattacccgataattaaatatcctacgaatacgaaataaaaaaacg

SEQ ID NO: 47545 - DNA, 50 bp, synthetic construct
  source 1..50: mol_type = other DNA
caactaattcaaaaaaaaacccaaaaacacctaatcatacctattaccca

SEQ ID NO: 47546 - DNA, 50 bp, synthetic construct
  source 1..50: mol_type = other DNA
cgactaattcgaaaaaaaacccgaaaacgcctaatcatacctattacccg

SEQ ID NO: 47547 - DNA, 50 bp, synthetic construct
  source 1..50: mol_type = other DNA
ataatcaaacacctccaaactttcctccaaattaatcaatatttaactca

SEQ ID NO: 47548 - DNA, 50 bp, synthetic construct
  source 1..50: mol_type = other DNA
ataatcaaacgcctccgaactttcctccgaattaatcgatatttaactcg

SEQ ID NO: 47549 - DNA, 50 bp, synthetic construct
  source 1..50: mol_type = other DNA
atacaaaaaacaataactaataatcaaccataaaatatacaacatcaaca

SEQ ID NO: 47550 - DNA, 50 bp, synthetic construct
  source 1..50: mol_type = other DNA
atacgaaaaacgataactaataatcgaccgtaaaatatacaacatcaacg

SEQ ID NO: 47551 - DNA, 50 bp, synthetic construct
  source 1..50: mol_type = other DNA
ctaaaccacctcatcccaaataaaataacacaaaataaatccctaaacca

SEQ ID NO: 47552 - DNA, 50 bp, synthetic construct
  source 1..50: mol_type = other DNA
ctaaaccacctcgtcccaaataaaataacgcgaaataaatccctaaaccg

SEQ ID NO: 47553 - DNA, 50 bp, synthetic construct
  source 1..50: mol_type = other DNA
caaacacatactcaaaatccacaaactccaaaaataaatttactaacaca

SEQ ID NO: 47554 - DNA, 50 bp, synthetic construct
  source 1..50: mol_type = other DNA
caaacgcgtactcgaaatccgcgaactccaaaaataaatttactaacgcg

SEQ ID NO: 47555 - DNA, 50 bp, synthetic construct
  source 1..50: mol_type = other DNA
acacatattaacaacccaactataaattacccaaaacccaccaaaaaaca

SEQ ID NO: 47556 - DNA, 50 bp, synthetic construct
  source 1..50: mol_type = other DNA
acgcgtattaacaacccaactataaattacccaaaacccaccgaaaaacg

SEQ ID NO: 47557 - DNA, 50 bp, synthetic construct
  source 1..50: mol_type = other DNA
caaaaaacaccacaataaaaacaacaattctaatacaaaccctaaataca

SEQ ID NO: 47558 - DNA, 50 bp, synthetic construct
  source 1..50: mol_type = other DNA
caaaaaacgccgcgataaaaacaacgattctaatacaaaccctaaatacg

SEQ ID NO: 47559 - DNA, 50 bp, synthetic construct
  source 1..50: mol_type = other DNA
acaaaaccaaaattaaaatttttccatacacaaaactacccaaacaatca

SEQ ID NO: 47560 - DNA, 50 bp, synthetic construct
  source 1..50: mol_type = other DNA
acgaaaccgaaattaaaatttttccgtacacgaaactacccgaacgatcg

SEQ ID NO: 47561 - DNA, 50 bp, synthetic construct
  source 1..50: mol_type = other DNA
ttttattgtgttggttaagtgggtttggagtttttgattttaggtgattt

SEQ ID NO: 47562 - DNA, 50 bp, synthetic construct
  source 1..50: mol_type = other DNA
ttttatcgtgttggttaagtgggtttggagtttttgattttaggtgattc

SEQ ID NO: 47563 - DNA, 50 bp, synthetic construct
  source 1..50: mol_type = other DNA
catcctaaaaaaaataaacctaactacatccaaaaaactaacaaaacaca

SEQ ID NO: 47564 - DNA, 50 bp, synthetic construct
  source 1..50: mol_type = other DNA
cgtcctaaaaaaaataaacctaactacatccgaaaaactaacgaaacacg

SEQ ID NO: 47565 - DNA, 50 bp, synthetic construct
  source 1..50: mol_type = other DNA
taccaaacatcctaaaaaaaataaacctaactacatccaaaaaactaaca

SEQ ID NO: 47566 - DNA, 50 bp, synthetic construct
  source 1..50: mol_type = other DNA
taccgaacgtcctaaaaaaaataaacctaactacatccgaaaaactaacg

SEQ ID NO: 47567 - DNA, 50 bp, synthetic construct
  source 1..50: mol_type = other DNA
aaacaacttaataccaaacatcctaaaaaaaataaacctaactacatcca

SEQ ID NO: 47568 - DNA, 50 bp, synthetic construct
  source 1..50: mol_type = other DNA
aaacgacttaataccgaacgtcctaaaaaaaataaacctaactacatccg

SEQ ID NO: 47569 - DNA, 50 bp, synthetic construct
  source 1..50: mol_type = other DNA
taaaccaccccatccaactaaaatctaaaaaacctatctcttaccccaca

SEQ ID NO: 47570 - DNA, 50 bp, synthetic construct
  source 1..50: mol_type = other DNA
taaaccgccccatccaactaaaatctaaaaaacctatctcttaccccacg

SEQ ID NO: 47571 - DNA, 50 bp, synthetic construct
  source 1..50: mol_type = other DNA
aaaacaccaaaatataaataacacaaacaatataaaatactaaaatctca

SEQ ID NO: 47572 - DNA, 50 bp, synthetic construct
  source 1..50: mol_type = other DNA
aaaacgccaaaatataaataacgcgaacaatataaaatactaaaatctcg

SEQ ID NO: 47573 - DNA, 50 bp, synthetic construct
  source 1..50: mol_type = other DNA
caaaatataaataacacaaacaatataaaatactaaaatctcaactacca

SEQ ID NO: 47574 - DNA, 50 bp, synthetic construct
  source 1..50: mol_type = other DNA
caaaatataaataacgcgaacaatataaaatactaaaatctcgactaccg

SEQ ID NO: 47575 - DNA, 50 bp, synthetic construct
  source 1..50: mol_type = other DNA
atataaataacacaaacaatataaaatactaaaatctcaactaccacaca

SEQ ID NO: 47576 - DNA, 50 bp, synthetic construct
  source 1..50: mol_type = other DNA
atataaataacgcgaacaatataaaatactaaaatctcgactaccgcgcg

SEQ ID NO: 47577 - DNA, 50 bp, synthetic construct
  source 1..50: mol_type = other DNA
ccaaaaaaaaacatcacctaaccaaaccaaccctaaaattaaatacccca

SEQ ID NO: 47578 - DNA, 50 bp, synthetic construct
  source 1..50: mol_type = other DNA
ccaaaaaaaaacgtcacctaaccaaaccgaccctaaaattaaataccccg

SEQ ID NO: 47579 - DNA, 50 bp, synthetic construct
  source 1..50: mol_type = other DNA
taataaccacaccaactttatatcaacatcaaatacaaacccccaaaaca

SEQ ID NO: 47580 - DNA, 50 bp, synthetic construct
  source 1..50: mol_type = other DNA
taataaccgcgccgactttatatcgacatcaaatacaaacccccaaaacg

SEQ ID NO: 47581 - DNA, 50 bp, synthetic construct
  source 1..50: mol_type = other DNA
aaaaaaaatcccaataaaaacaacaaataaactccacacactccaaaaca

SEQ ID NO: 47582 - DNA, 50 bp, synthetic construct
  source 1..50: mol_type = other DNA
aaaaaaaatcccgataaaaacaacgaataaactccgcgcgctccgaaacg

SEQ ID NO: 47583 - DNA, 50 bp, synthetic construct
  source 1..50: mol_type = other DNA
aaaaaatcctaaaaaaaatcccaataaaaacaacaaataaactccacaca

SEQ ID NO: 47584 - DNA, 50 bp, synthetic construct
  source 1..50: mol_type = other DNA
aaaaaatcctaaaaaaaatcccgataaaaacaacgaataaactccgcgcg

SEQ ID NO: 47585 - DNA, 50 bp, synthetic construct
  source 1..50: mol_type = other DNA
acaaccaaattaatacaaacactctactaatcactataaaaactcaaaca

SEQ ID NO: 47586 - DNA, 50 bp, synthetic construct
  source 1..50: mol_type = other DNA
gcgaccgaattaatacaaacgctctactaatcgctataaaaactcgaacg

SEQ ID NO: 47587 - DNA, 50 bp, synthetic construct
  source 1..50: mol_type = other DNA
atcactataaaaactcaaacaacaaaaaacacaaaaaaatataaaaccca

SEQ ID NO: 47588 - DNA, 50 bp, synthetic construct
  source 1..50: mol_type = other DNA
atcgctataaaaactcgaacgacgaaaaacgcgaaaaaatataaaacccg

SEQ ID NO: 47589 - DNA, 50 bp, synthetic construct
  source 1..50: mol_type = other DNA
ttatacttctaaatctcctcccaactaaaaataaacaccaacacctcaca

SEQ ID NO: 47590 - DNA, 50 bp, synthetic construct
  source 1..50: mol_type = other DNA
ttatacttctaaatctcctcccaactaaaaataaacaccgacacctcgcg

SEQ ID NO: 47591 - DNA, 50 bp, synthetic construct
  source 1..50: mol_type = other DNA
caaataatccatccaacacccaaaaaaccaacaaatcatcaaacactaca

SEQ ID NO: 47592 - DNA, 50 bp, synthetic construct
  source 1..50: mol_type = other DNA
caaataatccatccaacacccgaaaaaccaacgaatcatcgaacactacg

SEQ ID NO: 47593 - DNA, 50 bp, synthetic construct
  source 1..50: mol_type = other DNA
atcatcaaacactacactaaaaaaaatacaacaataaaaatctaaaaaca

SEQ ID NO: 47594 - DNA, 50 bp, synthetic construct
  source 1..50: mol_type = other DNA
atcatcgaacactacgctaaaaaaaatacaacgataaaaatctaaaaacg

SEQ ID NO: 47595 - DNA, 50 bp, synthetic construct
  source 1..50: mol_type = other DNA
ctcctctaaaccaactaaaataaaaaccaaatctaaaacccaaaaaaaca

SEQ ID NO: 47596 - DNA, 50 bp, synthetic construct
  source 1..50: mol_type = other DNA
ctcctctaaaccgactaaaataaaaaccgaatctaaaacccgaaaaaacg

SEQ ID NO: 47597 - DNA, 50 bp, synthetic construct
  source 1..50: mol_type = other DNA
ctctaaaccaactaaaataaaaaccaaatctaaaacccaaaaaaacaaca

SEQ ID NO: 47598 - DNA, 50 bp, synthetic construct
  source 1..50: mol_type = other DNA
ctctaaaccgactaaaataaaaaccgaatctaaaacccgaaaaaacgacg

SEQ ID NO: 47599 - DNA, 50 bp, synthetic construct
  source 1..50: mol_type = other DNA
aaccaactaaaataaaaaccaaatctaaaacccaaaaaaacaacactaca

SEQ ID NO: 47600 - DNA, 50 bp, synthetic construct
  source 1..50: mol_type = other DNA
aaccgactaaaataaaaaccgaatctaaaacccgaaaaaacgacgctacg

SEQ ID NO: 47601 - DNA, 50 bp, synthetic construct
  source 1..50: mol_type = other DNA
cactacaataaaaatcccaacaataaaaaacaaaacaaacatctaccaca

SEQ ID NO: 47602 - DNA, 50 bp, synthetic construct
  source 1..50: mol_type = other DNA
cgctacgataaaaatcccaacgataaaaaacaaaacaaacatctaccgcg

SEQ ID NO: 47603 - DNA, 50 bp, synthetic construct
  source 1..50: mol_type = other DNA
ctacaataaaaatcccaacaataaaaaacaaaacaaacatctaccacaca

SEQ ID NO: 47604 - DNA, 50 bp, synthetic construct
  source 1..50: mol_type = other DNA
ctacgataaaaatcccaacgataaaaaacaaaacaaacatctaccgcgcg

SEQ ID NO: 47605 - DNA, 50 bp, synthetic construct
  source 1..50: mol_type = other DNA
ccttcctcaaaatttatctaaaaacaaaaactccccaaaaaaaacactca

SEQ ID NO: 47606 - DNA, 50 bp, synthetic construct
  source 1..50: mol_type = other DNA
ccttcctcgaaatttatctaaaaacaaaaactccccaaaaaaaacgctcg

SEQ ID NO: 47607 - DNA, 50 bp, synthetic construct
  source 1..50: mol_type = other DNA
taaaaacaaaaactccccaaaaaaaacactcaaaccaaacaactttaaca

SEQ ID NO: 47608 - DNA, 50 bp, synthetic construct
  source 1..50: mol_type = other DNA
taaaaacaaaaactccccaaaaaaaacgctcgaaccaaacgactttaacg

SEQ ID NO: 47609 - DNA, 50 bp, synthetic construct
  source 1..50: mol_type = other DNA
aataaaacccacatccccaaacccaaaaaccctatttactatcatccaca

SEQ ID NO: 47610 - DNA, 50 bp, synthetic construct
  source 1..50: mol_type = other DNA
aataaaacccacatccccaaacccaaaaaccctatttactatcatccacg

SEQ ID NO: 47611 - DNA, 50 bp, synthetic construct
  source 1..50: mol_type = other DNA
aaataaacacaaaaacttcaaaatatccaaccaaacaccccaaaaatcca

SEQ ID NO: 47612 - DNA, 50 bp, synthetic construct
  source 1..50: mol_type = other DNA
gaataaacacgaaaacttcgaaatatccaaccaaacaccccgaaaatccg

SEQ ID NO: 47613 - DNA, 50 bp, synthetic construct
  source 1..50: mol_type = other DNA
actccctactatccctaataacttactttacaaacccctaaaaaacccca

SEQ ID NO: 47614 - DNA, 50 bp, synthetic construct
  source 1..50: mol_type = other DNA
actccctactatccctaataacttactttacgaacccctaaaaaaccccg

SEQ ID NO: 47615 - DNA, 50 bp, synthetic construct
  source 1..50: mol_type = other DNA
aaaacaaattaccaaaaacaataaaaaacacaacccaccccacactaaca

SEQ ID NO: 47616 - DNA, 50 bp, synthetic construct
  source 1..50: mol_type = other DNA
aaaacaaattaccaaaaacaataaaaaacacgacccgccccacactaacg

SEQ ID NO: 47617 - DNA, 50 bp, synthetic construct
  source 1..50: mol_type = other DNA
caccaaaaaaatactaacaccaaaaatccacaacaactaaacctacaaca

SEQ ID NO: 47618 - DNA, 50 bp, synthetic construct
  source 1..50: mol_type = other DNA
cgccaaaaaaatactaacaccgaaaatccacgacaactaaacctacaacg

SEQ ID NO: 47619 - DNA, 50 bp, synthetic construct
  source 1..50: mol_type = other DNA
ccaacacacaacaatctctaccaaaatataaacaaaaaaaataccattca

SEQ ID NO: 47620 - DNA, 50 bp, synthetic construct
  source 1..50: mol_type = other DNA
ccaacgcacaacgatctctaccaaaatataaacgaaaaaaataccattcg

SEQ ID NO: 47621 - DNA, 50 bp, synthetic construct
  source 1..50: mol_type = other DNA
aaaatataaacaaaaaaaataccattcaaaacctacactaactcaaaaca

SEQ ID NO: 47622 - DNA, 50 bp, synthetic construct
  source 1..50: mol_type = other DNA
aaaatataaacgaaaaaaataccattcgaaacctacgctaactcaaaacg

SEQ ID NO: 47623 - DNA, 50 bp, synthetic construct
  source 1..50: mol_type = other DNA
tataaacaaaaaaaataccattcaaaacctacactaactcaaaacaccca

SEQ ID NO: 47624 - DNA, 50 bp, synthetic construct
  source 1..50: mol_type = other DNA
tataaacgaaaaaaataccattcgaaacctacgctaactcaaaacgcccg

SEQ ID NO: 47625 - DNA, 50 bp, synthetic construct
  source 1..50: mol_type = other DNA
taaacaaaaaaaataccattcaaaacctacactaactcaaaacacccaca

SEQ ID NO: 47626 - DNA, 50 bp, synthetic construct
  source 1..50: mol_type = other DNA
taaacgaaaaaaataccattcgaaacctacgctaactcaaaacgcccgcg

SEQ ID NO: 47627 - DNA, 50 bp, synthetic construct
  source 1..50: mol_type = other DNA
aactcaaaacacccacataacactaaaaaccaacaaaatttaaacaaaca

SEQ ID NO: 47628 - DNA, 50 bp, synthetic construct
  source 1..50: mol_type = other DNA
aactcaaaacgcccgcgtaacactaaaaaccaacaaaatttaaacaaacg

SEQ ID NO: 47629 - DNA, 50 bp, synthetic construct
  source 1..50: mol_type = other DNA
taatatatatacctacctttctaccaaaacataacaaaataaaaaacaca

SEQ ID NO: 47630 - DNA, 50 bp, synthetic construct
  source 1..50: mol_type = other DNA
taatatatatacctacctttctaccaaaacgtaacgaaataaaaaacacg

SEQ ID NO: 47631 - DNA, 50 bp, synthetic construct
  source 1..50: mol_type = other DNA
tactattaaaaaatacaaattcattataccccaacccacatccccccaca

SEQ ID NO: 47632 - DNA, 50 bp, synthetic construct
  source 1..50: mol_type = other DNA
tactattaaaaaatacaaattcattataccccaacccacgtccccccacg

SEQ ID NO: 47633 - DNA, 50 bp, synthetic construct
  source 1..50: mol_type = other DNA
ctaaaccaacaattaaaccaacaaaaacactacatactaaactaaaacca

SEQ ID NO: 47634 - DNA, 50 bp, synthetic construct
  source 1..50: mol_type = other DNA
ctaaaccgacaattaaaccgacgaaaacgctacgtactaaactaaaaccg

SEQ ID NO: 47635 - DNA, 50 bp, synthetic construct
  source 1..50: mol_type = other DNA
caaaccataacctacaaaaaacactattccaaaacaaaaacaaaacctca

SEQ ID NO: 47636 - DNA, 50 bp, synthetic construct
  source 1..50: mol_type = other DNA
caaaccgtaacctacaaaaaacgctattccgaaacgaaaacaaaacctcg

SEQ ID NO: 47637 - DNA, 50 bp, synthetic construct
  source 1..50: mol_type = other DNA
aaacaataaaaacaaaaaccaacaaaaaacacccaaaataaaacccaaca

SEQ ID NO: 47638 - DNA, 50 bp, synthetic construct
  source 1..50: mol_type = other DNA
gaacaataaaaacaaaaaccgacaaaaaacgcccgaaataaaacccaacg

SEQ ID NO: 47639 - DNA, 50 bp, synthetic construct
  source 1..50: mol_type = other DNA
ataaaaacaaaaaccaacaaaaaacacccaaaataaaacccaacacacca

SEQ ID NO: 47640 - DNA, 50 bp, synthetic construct
  source 1..50: mol_type = other DNA
ataaaaacaaaaaccgacaaaaaacgcccgaaataaaacccaacgcgccg

SEQ ID NO: 47641 - DNA, 50 bp, synthetic construct
  source 1..50: mol_type = other DNA
taaaaataacaaaacaaaataaacctaaaccccaaataccaaataccaca

SEQ ID NO: 47642 - DNA, 50 bp, synthetic construct
  source 1..50: mol_type = other DNA
taaaaataacgaaacgaaataaacctaaaccccaaataccgaataccgcg

SEQ ID NO: 47643 - DNA, 50 bp, synthetic construct
  source 1..50: mol_type = other DNA
aaataacaaaacaaaataaacctaaaccccaaataccaaataccacaaca

SEQ ID NO: 47644 - DNA, 50 bp, synthetic construct
  source 1..50: mol_type = other DNA
aaataacgaaacgaaataaacctaaaccccaaataccgaataccgcgacg

SEQ ID NO: 47645 - DNA, 50 bp, synthetic construct
  source 1..50: mol_type = other DNA
ctcaacaacactcaataccaaataacacaccaatatacactccctataca

SEQ ID NO: 47646 - DNA, 50 bp, synthetic construct
  source 1..50: mol_type = other DNA
ctcaacgacactcaataccaaataacacgccaatatacactccctatacg

SEQ ID NO: 47647 - DNA, 50 bp, synthetic construct
  source 1..50: mol_type = other DNA
cactcaataccaaataacacaccaatatacactccctatacatataacca

SEQ ID NO: 47648 - DNA, 50 bp, synthetic construct
  source 1..50: mol_type = other DNA
cactcaataccaaataacacgccaatatacactccctatacgtataaccg

SEQ ID NO: 47649 - DNA, 50 bp, synthetic construct
  source 1..50: mol_type = other DNA
caaaataaataaaataaaacaaacatccccaccctaacaacaaataacca

SEQ ID NO: 47650 - DNA, 50 bp, synthetic construct
  source 1..50: mol_type = other DNA
caaaataaataaaataaaacaaacatccccaccctaacaacgaataaccg

SEQ ID NO: 47651 - DNA, 50 bp, synthetic construct
  source 1..50: mol_type = other DNA
tacaactaaacacataattaccactttttttccaaaaccttaaaaaaaca

SEQ ID NO: 47652 - DNA, 50 bp, synthetic construct
  source 1..50: mol_type = other DNA
tacaactaaacacataattaccactttttttccaaaaccttaaaaaaacg

SEQ ID NO: 47653 - DNA, 50 bp, synthetic construct
  source 1..50: mol_type = other DNA
aatcatcctatctaaaaaaactctaatcacacctacctaaaaaacataca

SEQ ID NO: 47654 - DNA, 50 bp, synthetic construct
  source 1..50: mol_type = other DNA
aatcatcctatctaaaaaaactctaatcgcgcctacctaaaaaacgtacg

SEQ ID NO: 47655 - DNA, 50 bp, synthetic construct
  source 1..50: mol_type = other DNA
atcctatctaaaaaaactctaatcacacctacctaaaaaacatacaaaca

SEQ ID NO: 47656 - DNA, 50 bp, synthetic construct
  source 1..50: mol_type = other DNA
atcctatctaaaaaaactctaatcgcgcctacctaaaaaacgtacgaacg

SEQ ID NO: 47657 - DNA, 50 bp, synthetic construct
  source 1..50: mol_type = other DNA
aaataatacactaatactcaccaaaacaaacactatacctacaaaaacca

SEQ ID NO: 47658 - DNA, 50 bp, synthetic construct
  source 1..50: mol_type = other DNA
aaataatacactaatactcgccgaaacgaacgctatacctacgaaaaccg

SEQ ID NO: 47659 - DNA, 50 bp, synthetic construct
  source 1..50: mol_type = other DNA
aaataacccacatcaccaaaataatacactaatactcaccaaaacaaaca

SEQ ID NO: 47660 - DNA, 50 bp, synthetic construct
  source 1..50: mol_type = other DNA
aaataacccacgtcaccgaaataatacactaatactcgccgaaacgaacg

SEQ ID NO: 47661 - DNA, 50 bp, synthetic construct
  source 1..50: mol_type = other DNA
aaacaaataacccacatcaccaaaataatacactaatactcaccaaaaca

SEQ ID NO: 47662 - DNA, 50 bp, synthetic construct
  source 1..50: mol_type = other DNA
aaacaaataacccacgtcaccgaaataatacactaatactcgccgaaacg

SEQ ID NO: 47663 - DNA, 50 bp, synthetic construct
  source 1..50: mol_type = other DNA
catcaaaacaaataacccacatcaccaaaataatacactaatactcacca

SEQ ID NO: 47664 - DNA, 50 bp, synthetic construct
  source 1..50: mol_type = other DNA
catcaaaacaaataacccacgtcaccgaaataatacactaatactcgccg

SEQ ID NO: 47665 - DNA, 50 bp, synthetic construct
  source 1..50: mol_type = other DNA
aacatttaaaaaaacacaaaaacacacattaacatacacaaaatcaccca

SEQ ID NO: 47666 - DNA, 50 bp, synthetic construct
  source 1..50: mol_type = other DNA
aacatttaaaaaaacacaaaaacgcacattaacgtacacgaaatcgcccg

SEQ ID NO: 47667 - DNA, 50 bp, synthetic construct
  source 1..50: mol_type = other DNA
tacacaaaatcacccaaaaaaactaaaaactaacaaaatcacaaatacca

SEQ ID NO: 47668 - DNA, 50 bp, synthetic construct
  source 1..50: mol_type = other DNA
tacacgaaatcgcccgaaaaaactaaaaactaacgaaatcacgaataccg

SEQ ID NO: 47669 - DNA, 50 bp, synthetic construct
  source 1..50: mol_type = other DNA
aatcacccaaaaaaactaaaaactaacaaaatcacaaataccaaactcca

SEQ ID NO: 47670 - DNA, 50 bp, synthetic construct
  source 1..50: mol_type = other DNA
aatcgcccgaaaaaactaaaaactaacgaaatcacgaataccgaactccg

SEQ ID NO: 47671 - DNA, 50 bp, synthetic construct
  source 1..50: mol_type = other DNA
actaacaaaatcacaaataccaaactccaaacaaaaaataaaacaaaaca

SEQ ID NO: 47672 - DNA, 50 bp, synthetic construct
  source 1..50: mol_type = other DNA
actaacgaaatcacgaataccgaactccgaacgaaaaataaaacaaaacg

SEQ ID NO: 47673 - DNA, 50 bp, synthetic construct
  source 1..50: mol_type = other DNA
ttactttaaccaacaatcaaaacatttatccaataaaaaacaacaacaca

SEQ ID NO: 47674 - DNA, 50 bp, synthetic construct
  source 1..50: mol_type = other DNA
ttactttaaccaacgatcaaaacgtttatccgataaaaaacaacgacgcg

SEQ ID NO: 47675 - DNA, 50 bp, synthetic construct
  source 1..50: mol_type = other DNA
acttactttaaccaacaatcaaaacatttatccaataaaaaacaacaaca

SEQ ID NO: 47676 - DNA, 50 bp, synthetic construct
  source 1..50: mol_type = other DNA
acttactttaaccaacgatcaaaacgtttatccgataaaaaacaacgacg

SEQ ID NO: 47677 - DNA, 50 bp, synthetic construct
  source 1..50: mol_type = other DNA
aatacttactttaaccaacaatcaaaacatttatccaataaaaaacaaca

SEQ ID NO: 47678 - DNA, 50 bp, synthetic construct
  source 1..50: mol_type = other DNA
aatacttactttaaccaacgatcaaaacgtttatccgataaaaaacaacg

SEQ ID NO: 47679 - DNA, 50 bp, synthetic construct
  source 1..50: mol_type = other DNA
taaacaacctaaaaaaactaaaaaactccacaaatcccacaaccaaaaca

SEQ ID NO: 47680 - DNA, 50 bp, synthetic construct
  source 1..50: mol_type = other DNA
taaacaacctaaaaaaactaaaaaactccacaaatcccgcgaccaaaacg

SEQ ID NO: 47681 - DNA, 50 bp, synthetic construct
  source 1..50: mol_type = other DNA
tataaaaactaaaatcaaaattcataaaatcacaaaaaccacataccaca

SEQ ID NO: 47682 - DNA, 50 bp, synthetic construct
  source 1..50: mol_type = other DNA
tataaaaactaaaatcaaaattcataaaatcgcaaaaaccgcgtaccgcg

SEQ ID NO: 47683 - DNA, 50 bp, synthetic construct
  source 1..50: mol_type = other DNA
ccccaacttttaaaaaacacacaacacaaaaaataaaccaataataaaca

SEQ ID NO: 47684 - DNA, 50 bp, synthetic construct
  source 1..50: mol_type = other DNA
ccccaacttttaaaaaacacgcgacacgaaaaataaaccgataataaacg

SEQ ID NO: 47685 - DNA, 50 bp, synthetic construct
  source 1..50: mol_type = other DNA
ctatcccaaaccccaacttttaaaaaacacacaacacaaaaaataaacca

SEQ ID NO: 47686 - DNA, 50 bp, synthetic construct
  source 1..50: mol_type = other DNA
ctatcccaaaccccaacttttaaaaaacacgcgacacgaaaaataaaccg

SEQ ID NO: 47687 - DNA, 50 bp, synthetic construct
  source 1..50: mol_type = other DNA
aactaaaaacatcctcactcaatcaattcctcaaacaaattacaaaaaca

SEQ ID NO: 47688 - DNA, 50 bp, synthetic construct
  source 1..50: mol_type = other DNA
aactaaaaacatcctcactcgatcaattcctcgaacgaattacgaaaacg

SEQ ID NO: 47689 - DNA, 50 bp, synthetic construct
  source 1..50: mol_type = other DNA
catactcctcattctccacataaacatcatacaaccaaataaactcctca

SEQ ID NO: 47690 - DNA, 50 bp, synthetic construct
  source 1..50: mol_type = other DNA
cgtactcctcattctccacgtaaacatcatacaaccaaataaactcctcg

SEQ ID NO: 47691 - DNA, 50 bp, synthetic construct
  source 1..50: mol_type = other DNA
ctacccaacaactcccttcttccaaaaataatactaaaccccaaaaatca

SEQ ID NO: 47692 - DNA, 50 bp, synthetic construct
  source 1..50: mol_type = other DNA
ctacccgacaactcccttcttccgaaaataatactaaaccccaaaaatcg

SEQ ID NO: 47693 - DNA, 50 bp, synthetic construct
  source 1..50: mol_type = other DNA
aaaataaaaatctcacacaaaaaaacaaacaataccaaaatacacataca

SEQ ID NO: 47694 - DNA, 50 bp, synthetic construct
  source 1..50: mol_type = other DNA
gaaataaaaatctcgcacgaaaaaacgaacgataccgaaatacgcgtacg

SEQ ID NO: 47695 - DNA, 50 bp, synthetic construct
  source 1..50: mol_type = other DNA
aaacaaaataaaaatctcacacaaaaaaacaaacaataccaaaatacaca

SEQ ID NO: 47696 - DNA, 50 bp, synthetic construct
  source 1..50: mol_type = other DNA
gaacgaaataaaaatctcgcacgaaaaaacgaacgataccgaaatacgcg

SEQ ID NO: 47697 - DNA, 50 bp, synthetic construct
  source 1..50: mol_type = other DNA
ccaaacaaaataaaaatctcacacaaaaaaacaaacaataccaaaataca

SEQ ID NO: 47698 - DNA, 50 bp, synthetic construct
  source 1..50: mol_type = other DNA
ccgaacgaaataaaaatctcgcacgaaaaaacgaacgataccgaaatacg

SEQ ID NO: 47699 - DNA, 50 bp, synthetic construct
  source 1..50: mol_type = other DNA
taataaacaacaaaccacaacacctaaaaaaaacaactacaaatcaatca

SEQ ID NO: 47700 - DNA, 50 bp, synthetic construct
  source 1..50: mol_type = other DNA
taataaacgacaaaccacgacgcctaaaaaaaacgactacgaatcgatcg

SEQ ID NO: 47701 - DNA, 50 bp, synthetic construct
  source 1..50: mol_type = other DNA
tcatttccaaaaacataataaacaacaaaccacaacacctaaaaaaaaca

SEQ ID NO: 47702 - DNA, 50 bp, synthetic construct
  source 1..50: mol_type = other DNA
tcgtttccgaaaacataataaacgacaaaccacgacgcctaaaaaaaacg

SEQ ID NO: 47703 - DNA, 50 bp, synthetic construct
  source 1..50: mol_type = other DNA
taccctctccttttcatttccaaaaacataataaacaacaaaccacaaca

SEQ ID NO: 47704 - DNA, 50 bp, synthetic construct
  source 1..50: mol_type = other DNA
taccctctccttttcgtttccgaaaacataataaacgacaaaccacgacg

SEQ ID NO: 47705 - DNA, 50 bp, synthetic construct
  source 1..50: mol_type = other DNA
tatacaactcctactaaacaaaaaaaaccaaaaaaaaccacattcaatca

SEQ ID NO: 47706 - DNA, 50 bp, synthetic construct
  source 1..50: mol_type = other DNA
tatacgactcctactaaacgaaaaaaaccgaaaaaaaccgcgttcaatcg

SEQ ID NO: 47707 - DNA, 50 bp, synthetic construct
  source 1..50: mol_type = other DNA
cccctcattatacaactcctactaaacaaaaaaaaccaaaaaaaaccaca

SEQ ID NO: 47708 - DNA, 50 bp, synthetic construct
  source 1..50: mol_type = other DNA
cccctcattatacgactcctactaaacgaaaaaaaccgaaaaaaaccgcg

SEQ ID NO: 47709 - DNA, 50 bp, synthetic construct
  source 1..50: mol_type = other DNA
cacccctcattatacaactcctactaaacaaaaaaaaccaaaaaaaacca

SEQ ID NO: 47710 - DNA, 50 bp, synthetic construct
  source 1..50: mol_type = other DNA
cacccctcattatacgactcctactaaacgaaaaaaaccgaaaaaaaccg

SEQ ID NO: 47711 - DNA, 50 bp, synthetic construct
  source 1..50: mol_type = other DNA
aataaaaaccacacaataaaaaataaaacaaacttccaacactcccacca

SEQ ID NO: 47712 - DNA, 50 bp, synthetic construct
  source 1..50: mol_type = other DNA
aataaaaaccgcacaataaaaaataaaacgaacttccgacgctcccaccg

SEQ ID NO: 47713 - DNA, 50 bp, synthetic construct
  source 1..50: mol_type = other DNA
aaaaaaaaaacactaacctcatattcatataaaatcactcacaaaaaaca

SEQ ID NO: 47714 - DNA, 50 bp, synthetic construct
  source 1..50: mol_type = other DNA
aaaaaaaaaacgctaacctcatattcatataaaatcgctcgcgaaaaacg

SEQ ID NO: 47715 - DNA, 50 bp, synthetic construct
  source 1..50: mol_type = other DNA
ctaataaaaacatctaaaacatcccacaactaaaaacaaacaaaaacaca

SEQ ID NO: 47716 - DNA, 50 bp, synthetic construct
  source 1..50: mol_type = other DNA
ctaataaaaacatctaaaacatcccgcgactaaaaacgaacgaaaacgcg

SEQ ID NO: 47717 - DNA, 50 bp, synthetic construct
  source 1..50: mol_type = other DNA
ctcttatcctaataaaaacatctaaaacatcccacaactaaaaacaaaca

SEQ ID NO: 47718 - DNA, 50 bp, synthetic construct
  source 1..50: mol_type = other DNA
ctcttatcctaataaaaacatctaaaacatcccgcgactaaaaacgaacg

SEQ ID NO: 47719 - DNA, 50 bp, synthetic construct
  source 1..50: mol_type = other DNA
acccccaaccacaaaataccctaaatatccttattaaaacaaaaaactca

SEQ ID NO: 47720 - DNA, 50 bp, synthetic construct
  source 1..50: mol_type = other DNA
gcccccaaccgcgaaataccctaaatatccttattaaaacaaaaaactcg

SEQ ID NO: 47721 - DNA, 50 bp, synthetic construct
  source 1..50: mol_type = other DNA
ccacaaaataccctaaatatccttattaaaacaaaaaactcaaaaaaaca

SEQ ID NO: 47722 - DNA, 50 bp, synthetic construct
  source 1..50: mol_type = other DNA
ccgcgaaataccctaaatatccttattaaaacaaaaaactcgaaaaaacg

SEQ ID NO: 47723 - DNA, 50 bp, synthetic construct
  source 1..50: mol_type = other DNA
cctaaatatccttattaaaacaaaaaactcaaaaaaacaaaaccaaccca

SEQ ID NO: 47724 - DNA, 50 bp, synthetic construct
  source 1..50: mol_type = other DNA
cctaaatatccttattaaaacaaaaaactcgaaaaaacgaaaccaacccg

SEQ ID NO: 47725 - DNA, 50 bp, synthetic construct
  source 1..50: mol_type = other DNA
aaaaaaacaaaaccaacccaacaaccaacttaaaactccttataaaacca

SEQ ID NO: 47726 - DNA, 50 bp, synthetic construct
  source 1..50: mol_type = other DNA
gaaaaaacgaaaccaacccgacaaccgacttaaaactccttataaaaccg

SEQ ID NO: 47727 - DNA, 50 bp, synthetic construct
  source 1..50: mol_type = other DNA
atttaaaacaacacccaacctctaactactataccaaaaatcacaacaca

SEQ ID NO: 47728 - DNA, 50 bp, synthetic construct
  source 1..50: mol_type = other DNA
atttaaaacaacacccgacctctaactactataccgaaaatcgcaacacg

SEQ ID NO: 47729 - DNA, 50 bp, synthetic construct
  source 1..50: mol_type = other DNA
taaaacaccaccaattctaaaatcaaaattcaaacacctaacccaaaaca

SEQ ID NO: 47730 - DNA, 50 bp, synthetic construct
  source 1..50: mol_type = other DNA
taaaacgccgccaattctaaaatcgaaattcgaacacctaacccaaaacg

SEQ ID NO: 47731 - DNA, 50 bp, synthetic construct
  source 1..50: mol_type = other DNA
gtaggtgattatgttttggatttattatttggagagaatagtttagtttt

SEQ ID NO: 47732 - DNA, 50 bp, synthetic construct
  source 1..50: mol_type = other DNA
gtaggtgattatgtttcggatttattatttggagagaatagtttagtttc

SEQ ID NO: 47733 - DNA, 50 bp, synthetic construct
  source 1..50: mol_type = other DNA
cctcaccaacacaaaaacaattattaaaccccaactaaaaacccaactca

SEQ ID NO: 47734 - DNA, 50 bp, synthetic construct
  source 1..50: mol_type = other DNA
cctcaccaacacaaaaacgattattaaaccccaactaaaaacccgactcg

SEQ ID NO: 47735 - DNA, 50 bp, synthetic construct
  source 1..50: mol_type = other DNA
caaaaacaattattaaaccccaactaaaaacccaactcacactaacaaca

SEQ ID NO: 47736 - DNA, 50 bp, synthetic construct
  source 1..50: mol_type = other DNA
caaaaacgattattaaaccccaactaaaaacccgactcgcactaacaacg

SEQ ID NO: 47737 - DNA, 50 bp, synthetic construct
  source 1..50: mol_type = other DNA
actaaaaacccaactcacactaacaacaaaaaaaaccaaacaaattcaca

SEQ ID NO: 47738 - DNA, 50 bp, synthetic construct
  source 1..50: mol_type = other DNA
actaaaaacccgactcgcactaacaacgaaaaaaaccaaacaaattcacg

SEQ ID NO: 47739 - DNA, 50 bp, synthetic construct
  source 1..50: mol_type = other DNA
taacaacaaaaaaaaccaaacaaattcacacaacaatactaacaataaca

SEQ ID NO: 47740 - DNA, 50 bp, synthetic construct
  source 1..50: mol_type = other DNA
taacaacgaaaaaaaccaaacaaattcacgcaacgatactaacaataacg

SEQ ID NO: 47741 - DNA, 50 bp, synthetic construct
  source 1..50: mol_type = other DNA
caaaaaaaaccaaacaaattcacacaacaatactaacaataacaataaca

SEQ ID NO: 47742 - DNA, 50 bp, synthetic construct
  source 1..50: mol_type = other DNA
cgaaaaaaaccaaacaaattcacgcaacgatactaacaataacgataacg

SEQ ID NO: 47743 - DNA, 50 bp, synthetic construct
  source 1..50: mol_type = other DNA
aaccaaacaaattcacacaacaatactaacaataacaataacaacactca

SEQ ID NO: 47744 - DNA, 50 bp, synthetic construct
  source 1..50: mol_type = other DNA
aaccaaacaaattcacgcaacgatactaacaataacgataacgacactcg

SEQ ID NO: 47745 - DNA, 50 bp, synthetic construct
  source 1..50: mol_type = other DNA
ccactacaatcctctatatctaataacaaaaaataaaataacaaaaacca

SEQ ID NO: 47746 - DNA, 50 bp, synthetic construct
  source 1..50: mol_type = other DNA
ccgctacaatcctctatatctaataacgaaaaataaaataacaaaaaccg

SEQ ID NO: 47747 - DNA, 50 bp, synthetic construct
  source 1..50: mol_type = other DNA
taactcctatcaatacacctaccctaataattaccacaaaatcaaaccca

SEQ ID NO: 47748 - DNA, 50 bp, synthetic construct
  source 1..50: mol_type = other DNA
taactcctatcaatacacctaccctaataattaccgcaaaatcgaacccg

SEQ ID NO: 47749 - DNA, 50 bp, synthetic construct
  source 1..50: mol_type = other DNA
cctaatcatcaaactcataacctaataaacaaaaattaaaatattaaaca

SEQ ID NO: 47750 - DNA, 50 bp, synthetic construct
  source 1..50: mol_type = other DNA
cctaatcgtcgaactcataacctaataaacaaaaattaaaatattaaacg

SEQ ID NO: 47751 - DNA, 50 bp, synthetic construct
  source 1..50: mol_type = other DNA
aacaaaaattaaaatattaaacaaaaaacactaataacaaaaatccctca

SEQ ID NO: 47752 - DNA, 50 bp, synthetic construct
  source 1..50: mol_type = other DNA
aacaaaaattaaaatattaaacgaaaaacactaataacgaaaatccctcg

SEQ ID NO: 47753 - DNA, 50 bp, synthetic construct
  source 1..50: mol_type = other DNA
caaaaaacactaataacaaaaatccctcaccatataaatcattaataaca

SEQ ID NO: 47754 - DNA, 50 bp, synthetic construct
  source 1..50: mol_type = other DNA
cgaaaaacactaataacgaaaatccctcgccgtataaatcgttaataacg

SEQ ID NO: 47755 - DNA, 50 bp, synthetic construct
  source 1..50: mol_type = other DNA
aataaaatacatcaaccactacaaaaactacttatacctaccccactcca

SEQ ID NO: 47756 - DNA, 50 bp, synthetic construct
  source 1..50: mol_type = other DNA
aataaaatacatcaaccactacgaaaactacttatacctaccccgctccg

SEQ ID NO: 47757 - DNA, 50 bp, synthetic construct
  source 1..50: mol_type = other DNA
ataaatcattaataacaacaacaaaacaaaacaaacacaaataaccccca

SEQ ID NO: 47758 - DNA, 50 bp, synthetic construct
  source 1..50: mol_type = other DNA
ataaatcgttaataacgacaacgaaacgaaacaaacacaaataacccccg

SEQ ID NO: 47759 - DNA, 50 bp, synthetic construct
  source 1..50: mol_type = other DNA
aaatatcacaaacccaaataaataactataaccatccataaaaaaaaaca

SEQ ID NO: 47760 - DNA, 50 bp, synthetic construct
  source 1..50: mol_type = other DNA
aaatatcgcgaacccaaataaataactataaccgtccgtaaaaaaaaacg

SEQ ID NO: 47761 - DNA, 50 bp, synthetic construct
  source 1..50: mol_type = other DNA
aaaaaatcctaaaacttcatccaaaatccccaaaccctcacccaaaaaca

SEQ ID NO: 47762 - DNA, 50 bp, synthetic construct
  source 1..50: mol_type = other DNA
aaaaaatcctaaaacttcatccaaaatccccaaaccctcgcccaaaaacg

SEQ ID NO: 47763 - DNA, 50 bp, synthetic construct
  source 1..50: mol_type = other DNA
aaccctcacccaaaaacaaaaaactcccaaaaacaaaactatccttctca

SEQ ID NO: 47764 - DNA, 50 bp, synthetic construct
  source 1..50: mol_type = other DNA
aaccctcgcccaaaaacgaaaaactcccaaaaacaaaactatccttctcg

SEQ ID NO: 47765 - DNA, 50 bp, synthetic construct
  source 1..50: mol_type = other DNA
taatacaaaaaaatcaaaaaaacaccttaacacccaactctaacatccca

SEQ ID NO: 47766 - DNA, 50 bp, synthetic construct
  source 1..50: mol_type = other DNA
taatacgaaaaaatcgaaaaaacgccttaacacccgactctaacatcccg

SEQ ID NO: 47767 - DNA, 50 bp, synthetic construct
  source 1..50: mol_type = other DNA
caaacaaaaaacactaatacaaaaaaatcaaaaaaacaccttaacaccca

SEQ ID NO: 47768 - DNA, 50 bp, synthetic construct
  source 1..50: mol_type = other DNA
cgaacgaaaaacgctaatacgaaaaaatcgaaaaaacgccttaacacccg

SEQ ID NO: 47769 - DNA, 50 bp, synthetic construct
  source 1..50: mol_type = other DNA
ttccacctccacccaaaataaaaacatatccttaaaacaaaatataaaca

SEQ ID NO: 47770 - DNA, 50 bp, synthetic construct
  source 1..50: mol_type = other DNA
ttccgcctccgcccgaaataaaaacgtatccttaaaacgaaatataaacg

SEQ ID NO: 47771 - DNA, 50 bp, synthetic construct
  source 1..50: mol_type = other DNA
caaaaaaaacataacctctatttacccacatctttaaacaaaaccaaaca

SEQ ID NO: 47772 - DNA, 50 bp, synthetic construct
  source 1..50: mol_type = other DNA
caaaaaaaacgtaacctctatttacccacgtctttaaacgaaaccaaacg

SEQ ID NO: 47773 - DNA, 50 bp, synthetic construct
  source 1..50: mol_type = other DNA
acctctatttacccacatctttaaacaaaaccaaacaaaaaaacactaca

SEQ ID NO: 47774 - DNA, 50 bp, synthetic construct
  source 1..50: mol_type = other DNA
acctctatttacccacgtctttaaacgaaaccaaacgaaaaaacactacg

SEQ ID NO: 47775 - DNA, 50 bp, synthetic construct
  source 1..50: mol_type = other DNA
atttacccacatctttaaacaaaaccaaacaaaaaaacactacatatcca

SEQ ID NO: 47776 - DNA, 50 bp, synthetic construct
  source 1..50: mol_type = other DNA
atttacccacgtctttaaacgaaaccaaacgaaaaaacactacgtatccg

SEQ ID NO: 47777 - DNA, 50 bp, synthetic construct
  source 1..50: mol_type = other DNA
tctttaaacaaaaccaaacaaaaaaacactacatatccaaaaatccccca

SEQ ID NO: 47778 - DNA, 50 bp, synthetic construct
  source 1..50: mol_type = other DNA
tctttaaacgaaaccaaacgaaaaaacactacgtatccgaaaatcccccg

SEQ ID NO: 47779 - DNA, 50 bp, synthetic construct
  source 1..50: mol_type = other DNA
aaataacaaaaaacaaacactacacaattcacctaaaccccaaacactca

SEQ ID NO: 47780 - DNA, 50 bp, synthetic construct
  source 1..50: mol_type = other DNA
aaataacgaaaaacgaacactacgcaattcacctaaaccccaaacgctcg

SEQ ID NO: 47781 - DNA, 50 bp, synthetic construct
  source 1..50: mol_type = other DNA
aacatactaataaatcccacaacaaacacctaaaactcaaataaactaca

SEQ ID NO: 47782 - DNA, 50 bp, synthetic construct
  source 1..50: mol_type = other DNA
aacgtactaataaatcccgcgacgaacgcctaaaactcaaataaactacg

SEQ ID NO: 47783 - DNA, 50 bp, synthetic construct
  source 1..50: mol_type = other DNA
ttcttcctaaatcaatattcaacatctatccactccctcaataacttcca

SEQ ID NO: 47784 - DNA, 50 bp, synthetic construct
  source 1..50: mol_type = other DNA
ttcttcctaaatcaatattcaacgtctatccactccctcgataacttccg

SEQ ID NO: 47785 - DNA, 50 bp, synthetic construct
  source 1..50: mol_type = other DNA
aacaaaaccaaactaaacaaaaaaacaaaactactcaccaaaaaccatca

SEQ ID NO: 47786 - DNA, 50 bp, synthetic construct
  source 1..50: mol_type = other DNA
aacaaaaccaaactaaacaaaaaaacaaaactactcaccgaaaaccatcg

SEQ ID NO: 47787 - DNA, 50 bp, synthetic construct
  source 1..50: mol_type = other DNA
accactaaccactcaacaacatacaattcttcctaaatcaatattcaaca

SEQ ID NO: 47788 - DNA, 50 bp, synthetic construct
  source 1..50: mol_type = other DNA
accactaaccactcaacgacgtacgattcttcctaaatcaatattcaacg

SEQ ID NO: 47789 - DNA, 50 bp, synthetic construct
  source 1..50: mol_type = other DNA
aaaccatcaaaaaaataaacaaacactaaatactaattcaaaaaaaacca

SEQ ID NO: 47790 - DNA, 50 bp, synthetic construct
  source 1..50: mol_type = other DNA
aaaccatcgaaaaaataaacaaacgctaaatactaattcaaaaaaaaccg

SEQ ID NO: 47791 - DNA, 50 bp, synthetic construct
  source 1..50: mol_type = other DNA
catcaaaaaaataaacaaacactaaatactaattcaaaaaaaaccacaca

SEQ ID NO: 47792 - DNA, 50 bp, synthetic construct
  source 1..50: mol_type = other DNA
catcgaaaaaataaacaaacgctaaatactaattcaaaaaaaaccgcacg

SEQ ID NO: 47793 - DNA, 50 bp, synthetic construct
  source 1..50: mol_type = other DNA
caaaaaaataaacaaacactaaatactaattcaaaaaaaaccacacatca

SEQ ID NO: 47794 - DNA, 50 bp, synthetic construct
  source 1..50: mol_type = other DNA
cgaaaaaataaacaaacgctaaatactaattcaaaaaaaaccgcacgtcg

SEQ ID NO: 47795 - DNA, 50 bp, synthetic construct
  source 1..50: mol_type = other DNA
ctaacatctttattataaatcaacttaacaaccacattcaccaaccccca

SEQ ID NO: 47796 - DNA, 50 bp, synthetic construct
  source 1..50: mol_type = other DNA
ctaacatctttattataaatcaacttaacgaccacgttcaccaacccccg

SEQ ID NO: 47797 - DNA, 50 bp, synthetic construct
  source 1..50: mol_type = other DNA
aacaatccaatacttaaaaattcaaaactcctaatttcaaattaaaacca

SEQ ID NO: 47798 - DNA, 50 bp, synthetic construct
  source 1..50: mol_type = other DNA
aacgatccgatacttaaaaattcgaaactcctaatttcgaattaaaaccg

SEQ ID NO: 47799 - DNA, 50 bp, synthetic construct
  source 1..50: mol_type = other DNA
cttaaaaattcaaaactcctaatttcaaattaaaaccaatataaaaaaca

SEQ ID NO: 47800 - DNA, 50 bp, synthetic construct
  source 1..50: mol_type = other DNA
cttaaaaattcgaaactcctaatttcgaattaaaaccgatataaaaaacg

SEQ ID NO: 47801 - DNA, 50 bp, synthetic construct
  source 1..50: mol_type = other DNA
aattcaaaactcctaatttcaaattaaaaccaatataaaaaacaataaca

SEQ ID NO: 47802 - DNA, 50 bp, synthetic construct
  source 1..50: mol_type = other DNA
aattcgaaactcctaatttcgaattaaaaccgatataaaaaacgataacg

SEQ ID NO: 47803 - DNA, 50 bp, synthetic construct
  source 1..50: mol_type = other DNA
ttcaaaactcctaatttcaaattaaaaccaatataaaaaacaataacaca

SEQ ID NO: 47804 - DNA, 50 bp, synthetic construct
  source 1..50: mol_type = other DNA
ttcgaaactcctaatttcgaattaaaaccgatataaaaaacgataacgcg

SEQ ID NO: 47805 - DNA, 50 bp, synthetic construct
  source 1..50: mol_type = other DNA
caaaactcctaatttcaaattaaaaccaatataaaaaacaataacacaca

SEQ ID NO: 47806 - DNA, 50 bp, synthetic construct
  source 1..50: mol_type = other DNA
cgaaactcctaatttcgaattaaaaccgatataaaaaacgataacgcgcg

SEQ ID NO: 47807 - DNA, 50 bp, synthetic construct
  source 1..50: mol_type = other DNA
caaattaaaaccaatataaaaaacaataacacacaaattccttaacatca

SEQ ID NO: 47808 - DNA, 50 bp, synthetic construct
  source 1..50: mol_type = other DNA
cgaattaaaaccgatataaaaaacgataacgcgcgaattccttaacatcg

SEQ ID NO: 47809 - DNA, 50 bp, synthetic construct
  source 1..50: mol_type = other DNA
aaaaaacaataacacacaaattccttaacatcaaaaatcaataacaccca

SEQ ID NO: 47810 - DNA, 50 bp, synthetic construct
  source 1..50: mol_type = other DNA
aaaaaacgataacgcgcgaattccttaacatcgaaaatcaataacacccg

SEQ ID NO: 47811 - DNA, 50 bp, synthetic construct
  source 1..50: mol_type = other DNA
atcattataaaaaaacaaccaatccaataaaacatccccaaaaaaaaaca

SEQ ID NO: 47812 - DNA, 50 bp, synthetic construct
  source 1..50: mol_type = other DNA
atcgttataaaaaaacaaccaatccgataaaacgtccccgaaaaaaaacg

SEQ ID NO: 47813 - DNA, 50 bp, synthetic construct
  source 1..50: mol_type = other DNA
aaaaccacatatcattataaaaaaacaaccaatccaataaaacatcccca

SEQ ID NO: 47814 - DNA, 50 bp, synthetic construct
  source 1..50: mol_type = other DNA
gaaaccgcatatcgttataaaaaaacaaccaatccgataaaacgtccccg

SEQ ID NO: 47815 - DNA, 50 bp, synthetic construct
  source 1..50: mol_type = other DNA
caaaacaaaaccacatatcattataaaaaaacaaccaatccaataaaaca

SEQ ID NO: 47816 - DNA, 50 bp, synthetic construct
  source 1..50: mol_type = other DNA
cgaaacgaaaccgcatatcgttataaaaaaacaaccaatccgataaaacg

SEQ ID NO: 47817 - DNA, 50 bp, synthetic construct
  source 1..50: mol_type = other DNA
ctttccaaaaacatttcaccaaattaactatccttccataacaacataca

SEQ ID NO: 47818 - DNA, 50 bp, synthetic construct
  source 1..50: mol_type = other DNA
ctttccgaaaacgtttcaccgaattaactatccttccataacgacatacg

SEQ ID NO: 47819 - DNA, 50 bp, synthetic construct
  source 1..50: mol_type = other DNA
aacaaacaatactccaaaaacctaaccaaccataaaaaccaaaacaaaca

SEQ ID NO: 47820 - DNA, 50 bp, synthetic construct
  source 1..50: mol_type = other DNA
aacgaacgatactccaaaaacctaaccaaccataaaaaccgaaacaaacg

SEQ ID NO: 47821 - DNA, 50 bp, synthetic construct
  source 1..50: mol_type = other DNA
ctaaccaaccataaaaaccaaaacaaacaacctaaaaaaactaacaaaca

SEQ ID NO: 47822 - DNA, 50 bp, synthetic construct
  source 1..50: mol_type = other DNA
ctaaccaaccataaaaaccgaaacaaacgacctaaaaaaactaacgaacg

SEQ ID NO: 47823 - DNA, 50 bp, synthetic construct
  source 1..50: mol_type = other DNA
aaaccaaaacaaacaacctaaaaaaactaacaaacaaaaaaataacaaca

SEQ ID NO: 47824 - DNA, 50 bp, synthetic construct
  source 1..50: mol_type = other DNA
aaaccgaaacaaacgacctaaaaaaactaacgaacgaaaaaataacgacg

SEQ ID NO: 47825 - DNA, 50 bp, synthetic construct
  source 1..50: mol_type = other DNA
catacaaaaaataaatcaacaactacaaaaccacctaaacaaaatccaca

SEQ ID NO: 47826 - DNA, 50 bp, synthetic construct
  source 1..50: mol_type = other DNA
catacaaaaaataaatcgacaactacaaaaccacctaaacgaaatccgcg

SEQ ID NO: 47827 - DNA, 50 bp, synthetic construct
  source 1..50: mol_type = other DNA
tacaaacaaaaaaccataaactacacaacctctactacttcctaaactca

SEQ ID NO: 47828 - DNA, 50 bp, synthetic construct
  source 1..50: mol_type = other DNA
tacaaacaaaaaaccgtaaactacgcgacctctactacttcctaaactcg

SEQ ID NO: 47829 - DNA, 50 bp, synthetic construct
  source 1..50: mol_type = other DNA
acaaaaaaccataaactacacaacctctactacttcctaaactcaaaaca

SEQ ID NO: 47830 - DNA, 50 bp, synthetic construct
  source 1..50: mol_type = other DNA
acaaaaaaccgtaaactacgcgacctctactacttcctaaactcgaaacg

SEQ ID NO: 47831 - DNA, 50 bp, synthetic construct
  source 1..50: mol_type = other DNA
cacaaaaacctaaacaactattaacaaaaactaaccaaactaaaaaacca

SEQ ID NO: 47832 - DNA, 50 bp, synthetic construct
  source 1..50: mol_type = other DNA
cgcgaaaacctaaacgactattaacaaaaactaaccgaactaaaaaaccg

SEQ ID NO: 47833 - DNA, 50 bp, synthetic construct
  source 1..50: mol_type = other DNA
actactacaaaaaaacctaacacttaaaaaactctacctaacactaaaca

SEQ ID NO: 47834 - DNA, 50 bp, synthetic construct
  source 1..50: mol_type = other DNA
actactacgaaaaaacctaacgcttaaaaaactctacctaacgctaaacg

SEQ ID NO: 47835 - DNA, 50 bp, synthetic construct
  source 1..50: mol_type = other DNA
ctaacacttaaaaaactctacctaacactaaacaaaaaataaaaccccca

SEQ ID NO: 47836 - DNA, 50 bp, synthetic construct
  source 1..50: mol_type = other DNA
ctaacgcttaaaaaactctacctaacgctaaacgaaaaataaaacccccg

SEQ ID NO: 47837 - DNA, 50 bp, synthetic construct
  source 1..50: mol_type = other DNA
aacacttaaaaaactctacctaacactaaacaaaaaataaaacccccaca

SEQ ID NO: 47838 - DNA, 50 bp, synthetic construct
  source 1..50: mol_type = other DNA
aacgcttaaaaaactctacctaacgctaaacgaaaaataaaacccccgcg

SEQ ID NO: 47839 - DNA, 50 bp, synthetic construct
  source 1..50: mol_type = other DNA
aacaatccaaacaaacatcaacataaaaaaaacaataccttcaatcatca

SEQ ID NO: 47840 - DNA, 50 bp, synthetic construct
  source 1..50: mol_type = other DNA
aacaatccgaacgaacgtcgacgtaaaaaaaacaataccttcaatcatcg

SEQ ID NO: 47841 - DNA, 50 bp, synthetic construct
  source 1..50: mol_type = other DNA
attacccctaacctattcccccaataattaaaaacactacttcctccaca

SEQ ID NO: 47842 - DNA, 50 bp, synthetic construct
  source 1..50: mol_type = other DNA
attacccctaacctattcccccgataattaaaaacactacttcctccacg

SEQ ID NO: 47843 - DNA, 50 bp, synthetic construct
  source 1..50: mol_type = other DNA
actaaaaattaaattaaaaataataaacccaaacaaaaacaaaacccaca

SEQ ID NO: 47844 - DNA, 50 bp, synthetic construct
  source 1..50: mol_type = other DNA
actaaaaattaaattaaaaataataaacccgaacgaaaacgaaacccacg

SEQ ID NO: 47845 - DNA, 50 bp, synthetic construct
  source 1..50: mol_type = other DNA
attaaaaataataaacccaaacaaaaacaaaacccacaacctaaacaaca

SEQ ID NO: 47846 - DNA, 50 bp, synthetic construct
  source 1..50: mol_type = other DNA
attaaaaataataaacccgaacgaaaacgaaacccacgacctaaacaacg

SEQ ID NO: 47847 - DNA, 50 bp, synthetic construct
  source 1..50: mol_type = other DNA
actttatcttatctaacaaataaaactacatccactcaacctcatctcca

SEQ ID NO: 47848 - DNA, 50 bp, synthetic construct
  source 1..50: mol_type = other DNA
actttatcttatctaacaaataaaactacatccgctcgacctcatctccg

SEQ ID NO: 47849 - DNA, 50 bp, synthetic construct
  source 1..50: mol_type = other DNA
acttaaaaccaaaaatttaaaaccaacctaactaacttaacaaaacccca

SEQ ID NO: 47850 - DNA, 50 bp, synthetic construct
  source 1..50: mol_type = other DNA
acttaaaaccaaaaatttaaaaccaacctaactaacttaacgaaaccccg

SEQ ID NO: 47851 - DNA, 50 bp, synthetic construct
  source 1..50: mol_type = other DNA
ccacccaccttaacctcccacaatactaaaattataaacataaaacacca

SEQ ID NO: 47852 - DNA, 50 bp, synthetic construct
  source 1..50: mol_type = other DNA
ccacccgccttaacctcccacaatactaaaattataaacataaaacaccg

SEQ ID NO: 47853 - DNA, 50 bp, synthetic construct
  source 1..50: mol_type = other DNA
acccaccttaacctcccacaatactaaaattataaacataaaacaccaca

SEQ ID NO: 47854 - DNA, 50 bp, synthetic construct
  source 1..50: mol_type = other DNA
acccgccttaacctcccacaatactaaaattataaacataaaacaccgcg

SEQ ID NO: 47855 - DNA, 50 bp, synthetic construct
  source 1..50: mol_type = other DNA
atcaataaaatcttcaattccataaaatataataaataatataacaaaca

SEQ ID NO: 47856 - DNA, 50 bp, synthetic construct
  source 1..50: mol_type = other DNA
atcgataaaatcttcgattccgtaaaatataataaataatataacaaacg

SEQ ID NO: 47857 - DNA, 50 bp, synthetic construct
  source 1..50: mol_type = other DNA
tcctcaaataactaactaataaaataaaaacaaaaacattatactaaaca

SEQ ID NO: 47858 - DNA, 50 bp, synthetic construct
  source 1..50: mol_type = other DNA
tcctcaaataactaactaataaaataaaaacaaaaacgttatactaaacg

SEQ ID NO: 47859 - DNA, 50 bp, synthetic construct
  source 1..50: mol_type = other DNA
cactatcaaaacttacctaaacttataaacacttcccaaacaattaaaca

SEQ ID NO: 47860 - DNA, 50 bp, synthetic construct
  source 1..50: mol_type = other DNA
cgctatcgaaacttacctaaacttataaacgcttcccgaacgattaaacg

SEQ ID NO: 47861 - DNA, 50 bp, synthetic construct
  source 1..50: mol_type = other DNA
taaattctaactctaccactaaaccctaaatataaacacccaatcatcca

SEQ ID NO: 47862 - DNA, 50 bp, synthetic construct
  source 1..50: mol_type = other DNA
taaattctaactctaccgctaaaccctaaatataaacgcccaatcgtccg

SEQ ID NO: 47863 - DNA, 50 bp, synthetic construct
  source 1..50: mol_type = other DNA
acacttaaactcaaactaccactatcaaaacttacctaaacttataaaca

SEQ ID NO: 47864 - DNA, 50 bp, synthetic construct
  source 1..50: mol_type = other DNA
acgcttaaactcgaactaccgctatcgaaacttacctaaacttataaacg

SEQ ID NO: 47865 - DNA, 50 bp, synthetic construct
  source 1..50: mol_type = other DNA
aaaaaactacaaatacccatttcctatcaaaaaactacaaacacatatca

SEQ ID NO: 47866 - DNA, 50 bp, synthetic construct
  source 1..50: mol_type = other DNA
gaaaaactacaaatacccatttcctatcgaaaaactacgaacacgtatcg

SEQ ID NO: 47867 - DNA, 50 bp, synthetic construct
  source 1..50: mol_type = other DNA
cacccaaaaaactacaaatacccatttcctatcaaaaaactacaaacaca

SEQ ID NO: 47868 - DNA, 50 bp, synthetic construct
  source 1..50: mol_type = other DNA
cacccgaaaaactacaaatacccatttcctatcgaaaaactacgaacacg

SEQ ID NO: 47869 - DNA, 50 bp, synthetic construct
  source 1..50: mol_type = other DNA
caacaaacaacaaacaccattaaaaactaaaaataaaatcacaaaaatca

SEQ ID NO: 47870 - DNA, 50 bp, synthetic construct
  source 1..50: mol_type = other DNA
cgacgaacaacgaacgccgttaaaaactaaaaataaaatcgcgaaaatcg

SEQ ID NO: 47871 - DNA, 50 bp, synthetic construct
  source 1..50: mol_type = other DNA
aaacaacaaacaccattaaaaactaaaaataaaatcacaaaaatcaccca

SEQ ID NO: 47872 - DNA, 50 bp, synthetic construct
  source 1..50: mol_type = other DNA
gaacaacgaacgccgttaaaaactaaaaataaaatcgcgaaaatcgcccg

SEQ ID NO: 47873 - DNA, 50 bp, synthetic construct
  source 1..50: mol_type = other DNA
tcaatccctttaccaaatacaacaaataaaaacctcaaaattccaaaaca

SEQ ID NO: 47874 - DNA, 50 bp, synthetic construct
  source 1..50: mol_type = other DNA
tcgatccctttaccgaatacgacgaataaaaacctcgaaattccgaaacg

SEQ ID NO: 47875 - DNA, 50 bp, synthetic construct
  source 1..50: mol_type = other DNA
aaaatccaaaaaaatccaaacaataaaacctaccaaatccccaaaaacca

SEQ ID NO: 47876 - DNA, 50 bp, synthetic construct
  source 1..50: mol_type = other DNA
aaaatccaaaaaaatccgaacaataaaacctaccaaatccccgaaaaccg

SEQ ID NO: 47877 - DNA, 50 bp, synthetic construct
  source 1..50: mol_type = other DNA
caaaaaaatcaaaaaccaatctccaaaaacctaacaaattccactaccca

SEQ ID NO: 47878 - DNA, 50 bp, synthetic construct
  source 1..50: mol_type = other DNA
caaaaaaatcgaaaaccgatctccgaaaacctaacaaattccactacccg

SEQ ID NO: 47879 - DNA, 50 bp, synthetic construct
  source 1..50: mol_type = other DNA
cctaaactccccaaaccaaaaaacaataaaaacttaacaacaaaaaaaca

SEQ ID NO: 47880 - DNA, 50 bp, synthetic construct
  source 1..50: mol_type = other DNA
cctaaactccccaaaccgaaaaacgataaaaacttaacgacgaaaaaacg

SEQ ID NO: 47881 - DNA, 50 bp, synthetic construct
  source 1..50: mol_type = other DNA
aaaaacaactaaaccaaaataaaaatcccaacccaatctacaaccctcca

SEQ ID NO: 47882 - DNA, 50 bp, synthetic construct
  source 1..50: mol_type = other DNA
aaaaacaactaaaccaaaataaaaatcccgacccgatctacgaccctccg

SEQ ID NO: 47883 - DNA, 50 bp, synthetic construct
  source 1..50: mol_type = other DNA
tccatcaaaaaaacaactaaaccaaaataaaaatcccaacccaatctaca

SEQ ID NO: 47884 - DNA, 50 bp, synthetic construct
  source 1..50: mol_type = other DNA
tccgtcgaaaaaacaactaaaccaaaataaaaatcccgacccgatctacg

SEQ ID NO: 47885 - DNA, 50 bp, synthetic construct
  source 1..50: mol_type = other DNA
taaacacctaaaataatcacctcaaaaactaaaaaaatctctccacttca

SEQ ID NO: 47886 - DNA, 50 bp, synthetic construct
  source 1..50: mol_type = other DNA
taaacgcctaaaataatcgcctcgaaaactaaaaaaatctctccgcttcg

SEQ ID NO: 47887 - DNA, 50 bp, synthetic construct
  source 1..50: mol_type = other DNA
aaacataaacacctaaaataatcacctcaaaaactaaaaaaatctctcca

SEQ ID NO: 47888 - DNA, 50 bp, synthetic construct
  source 1..50: mol_type = other DNA
aaacgtaaacgcctaaaataatcgcctcgaaaactaaaaaaatctctccg

SEQ ID NO: 47889 - DNA, 50 bp, synthetic construct
  source 1..50: mol_type = other DNA
cttctacatccaccctacttcaaaaaaaacataaacacctaaaataatca

SEQ ID NO: 47890 - DNA, 50 bp, synthetic construct
  source 1..50: mol_type = other DNA
cttctacgtccaccctacttcaaaaaaaacgtaaacgcctaaaataatcg

SEQ ID NO: 47891 - DNA, 50 bp, synthetic construct
  source 1..50: mol_type = other DNA
tacccacctctaacttctacatccaccctacttcaaaaaaaacataaaca

SEQ ID NO: 47892 - DNA, 50 bp, synthetic construct
  source 1..50: mol_type = other DNA
tacccacctctaacttctacgtccaccctacttcaaaaaaaacgtaaacg

SEQ ID NO: 47893 - DNA, 50 bp, synthetic construct
  source 1..50: mol_type = other DNA
aaccaaaatcaaaaccaaactaaaaactaaaacaaaaatcctacccctca

SEQ ID NO: 47894 - DNA, 50 bp, synthetic construct
  source 1..50: mol_type = other DNA
aaccgaaatcgaaaccgaactaaaaactaaaacgaaaatcctacccctcg

SEQ ID NO: 47895 - DNA, 50 bp, synthetic construct
  source 1..50: mol_type = other DNA
aacccaacaaataaataaaacccaacaccaataatcccacaaaaaaacca

SEQ ID NO: 47896 - DNA, 50 bp, synthetic construct
  source 1..50: mol_type = other DNA
aacccaacaaataaataaaacccgacgccgataatcccacgaaaaaaccg

SEQ ID NO: 47897 - DNA, 50 bp, synthetic construct
  source 1..50: mol_type = other DNA
aactaacaactctacaaaatacacaactactaaattctaactcacccaca

SEQ ID NO: 47898 - DNA, 50 bp, synthetic construct
  source 1..50: mol_type = other DNA
aactaacgactctacgaaatacacgactactaaattctaactcacccgcg

SEQ ID NO: 47899 - DNA, 50 bp, synthetic construct
  source 1..50: mol_type = other DNA
ctcacccacaccatacaaaatcttttctttttataaataaaaaattctca

SEQ ID NO: 47900 - DNA, 50 bp, synthetic construct
  source 1..50: mol_type = other DNA
ctcacccgcgccgtacgaaatcttttctttttataaataaaaaattctcg

SEQ ID NO: 47901 - DNA, 50 bp, synthetic construct
  source 1..50: mol_type = other DNA
caaaatcttttctttttataaataaaaaattctcaaactaaaccactaca

SEQ ID NO: 47902 - DNA, 50 bp, synthetic construct
  source 1..50: mol_type = other DNA
cgaaatcttttctttttataaataaaaaattctcgaactaaaccactacg

SEQ ID NO: 47903 - DNA, 50 bp, synthetic construct
  source 1..50: mol_type = other DNA
cttttctttttataaataaaaaattctcaaactaaaccactacaaccaca

SEQ ID NO: 47904 - DNA, 50 bp, synthetic construct
  source 1..50: mol_type = other DNA
cttttctttttataaataaaaaattctcgaactaaaccactacgaccgcg

SEQ ID NO: 47905 - DNA, 50 bp, synthetic construct
  source 1..50: mol_type = other DNA
aaataaaaaattctcaaactaaaccactacaaccacaaaaaataaaaaca

SEQ ID NO: 47906 - DNA, 50 bp, synthetic construct
  source 1..50: mol_type = other DNA
aaataaaaaattctcgaactaaaccactacgaccgcgaaaaataaaaacg

SEQ ID NO: 47907 - DNA, 50 bp, synthetic construct
  source 1..50: mol_type = other DNA
aattctcaaactaaaccactacaaccacaaaaaataaaaacattacaaca

SEQ ID NO: 47908 - DNA, 50 bp, synthetic construct
  source 1..50: mol_type = other DNA
aattctcgaactaaaccactacgaccgcgaaaaataaaaacgttacaacg

SEQ ID NO: 47909 - DNA, 50 bp, synthetic construct
  source 1..50: mol_type = other DNA
tctcaaactaaaccactacaaccacaaaaaataaaaacattacaacaaca

SEQ ID NO: 47910 - DNA, 50 bp, synthetic construct
  source 1..50: mol_type = other DNA
tctcgaactaaaccactacgaccgcgaaaaataaaaacgttacaacgacg

SEQ ID NO: 47911 - DNA, 50 bp, synthetic construct
  source 1..50: mol_type = other DNA
aaaaaactacaaccaaacttaaaaaaacatcaccaaattcaaaaccaaca

SEQ ID NO: 47912 - DNA, 50 bp, synthetic construct
  source 1..50: mol_type = other DNA
aaaaaactacaaccgaacttaaaaaaacgtcgccaaattcgaaaccgacg

SEQ ID NO: 47913 - DNA, 50 bp, synthetic construct
  source 1..50: mol_type = other DNA
atcccaataaaaaaactacaaccaaacttaaaaaaacatcaccaaattca

SEQ ID NO: 47914 - DNA, 50 bp, synthetic construct
  source 1..50: mol_type = other DNA
atcccgataaaaaaactacaaccgaacttaaaaaaacgtcgccaaattcg

SEQ ID NO: 47915 - DNA, 50 bp, synthetic construct
  source 1..50: mol_type = other DNA
accaaacccatcccaataaaaaaactacaaccaaacttaaaaaaacatca

SEQ ID NO: 47916 - DNA, 50 bp, synthetic construct
  source 1..50: mol_type = other DNA
accgaacccatcccgataaaaaaactacaaccgaacttaaaaaaacgtcg

SEQ ID NO: 47917 - DNA, 50 bp, synthetic construct
  source 1..50: mol_type = other DNA
caaaccaaacccatcccaataaaaaaactacaaccaaacttaaaaaaaca

SEQ ID NO: 47918 - DNA, 50 bp, synthetic construct
  source 1..50: mol_type = other DNA
cgaaccgaacccatcccgataaaaaaactacaaccgaacttaaaaaaacg

SEQ ID NO: 47919 - DNA, 50 bp, synthetic construct
  source 1..50: mol_type = other DNA
ctctaacaaatacatcaatccacaaaaaaacccaaaactccacctaaaca

SEQ ID NO: 47920 - DNA, 50 bp, synthetic construct
  source 1..50: mol_type = other DNA
ctctaacaaatacgtcaatccgcaaaaaaacccgaaactccacctaaacg

SEQ ID NO: 47921 - DNA, 50 bp, synthetic construct
  source 1..50: mol_type = other DNA
cctcaaaaaaactaaaacaaaacacaaactctaacaaatacatcaatcca

SEQ ID NO: 47922 - DNA, 50 bp, synthetic construct
  source 1..50: mol_type = other DNA
cctcgaaaaaactaaaacgaaacgcgaactctaacaaatacgtcaatccg

SEQ ID NO: 47923 - DNA, 50 bp, synthetic construct
  source 1..50: mol_type = other DNA
caaaactttaaataacaattaacataactcctaaaaatataattctttca

SEQ ID NO: 47924 - DNA, 50 bp, synthetic construct
  source 1..50: mol_type = other DNA
cgaaactttaaataacgattaacgtaactcctaaaaatataattctttcg

SEQ ID NO: 47925 - DNA, 50 bp, synthetic construct
  source 1..50: mol_type = other DNA
aactcaacctccaacaatctcaccaaatcaaaatttaaaacaaaaaaaca

SEQ ID NO: 47926 - DNA, 50 bp, synthetic construct
  source 1..50: mol_type = other DNA
aactcaacctccaacaatctcaccgaatcgaaatttaaaacaaaaaaacg

SEQ ID NO: 47927 - DNA, 50 bp, synthetic construct
  source 1..50: mol_type = other DNA
atccaaaaacccaaaaccccattccaactttcttctataacaaaaacaca

SEQ ID NO: 47928 - DNA, 50 bp, synthetic construct
  source 1..50: mol_type = other DNA
atccaaaaacccgaaaccccattccaactttcttctataacgaaaacacg

SEQ ID NO: 47929 - DNA, 50 bp, synthetic construct
  source 1..50: mol_type = other DNA
acccaaaaaaccaacaaatcatcaaacactacactaaaaaaaatacaaca

SEQ ID NO: 47930 - DNA, 50 bp, synthetic construct
  source 1..50: mol_type = other DNA
acccgaaaaaccaacgaatcatcgaacactacgctaaaaaaaatacaacg

SEQ ID NO: 47931 - DNA, 50 bp, synthetic construct
  source 1..50: mol_type = other DNA
acccctattccccacaaaaacttctcaaaaaacctaaaacccataaacca

SEQ ID NO: 47932 - DNA, 50 bp, synthetic construct
  source 1..50: mol_type = other DNA
acccctattccccacaaaaacttctcgaaaaacctaaaacccataaaccg

SEQ ID NO: 47933 - DNA, 50 bp, synthetic construct
  source 1..50: mol_type = other DNA
caaaaacttctcaaaaaacctaaaacccataaaccataaacacaaaaaca

SEQ ID NO: 47934 - DNA, 50 bp, synthetic construct
  source 1..50: mol_type = other DNA
caaaaacttctcgaaaaacctaaaacccataaaccgtaaacgcaaaaacg

SEQ ID NO: 47935 - DNA, 50 bp, synthetic construct
  source 1..50: mol_type = other DNA
ttctcaaaaaacctaaaacccataaaccataaacacaaaaacaaaacaca

SEQ ID NO: 47936 - DNA, 50 bp, synthetic construct
  source 1..50: mol_type = other DNA
ttctcgaaaaacctaaaacccataaaccgtaaacgcaaaaacgaaacacg

SEQ ID NO: 47937 - DNA, 50 bp, synthetic construct
  source 1..50: mol_type = other DNA
aaacctaaaacccataaaccataaacacaaaaacaaaacacaaaaaacca

SEQ ID NO: 47938 - DNA, 50 bp, synthetic construct
  source 1..50: mol_type = other DNA
aaacctaaaacccataaaccgtaaacgcaaaaacgaaacacgaaaaaccg

SEQ ID NO: 47939 - DNA, 50 bp, synthetic construct
  source 1..50: mol_type = other DNA
acccataaaccataaacacaaaaacaaaacacaaaaaaccataccaaaca

SEQ ID NO: 47940 - DNA, 50 bp, synthetic construct
  source 1..50: mol_type = other DNA
acccataaaccgtaaacgcaaaaacgaaacacgaaaaaccgtaccaaacg

SEQ ID NO: 47941 - DNA, 50 bp, synthetic construct
  source 1..50: mol_type = other DNA
aaatatacaatttctcaatttaactaccaaatcctaaacaaaacccacca

SEQ ID NO: 47942 - DNA, 50 bp, synthetic construct
  source 1..50: mol_type = other DNA
aaatatacaatttctcgatttaactaccgaatcctaaacgaaacccaccg

SEQ ID NO: 47943 - DNA, 50 bp, synthetic construct
  source 1..50: mol_type = other DNA
aattaccaatccaatatccacacaataaaaccccaaaactaactctatca

SEQ ID NO: 47944 - DNA, 50 bp, synthetic construct
  source 1..50: mol_type = other DNA
aattaccaatccgatatccgcacaataaaaccccgaaactaactctatcg

SEQ ID NO: 47945 - DNA, 50 bp, synthetic construct
  source 1..50: mol_type = other DNA
caataacatatacacttaaaactcacctcaaattaccaatccaatatcca

SEQ ID NO: 47946 - DNA, 50 bp, synthetic construct
  source 1..50: mol_type = other DNA
caataacgtatacgcttaaaactcgcctcgaattaccaatccgatatccg

SEQ ID NO: 47947 - DNA, 50 bp, synthetic construct
  source 1..50: mol_type = other DNA
actatacaaataccaaattaataatccaaaacaaaccctaaacacacaca

SEQ ID NO: 47948 - DNA, 50 bp, synthetic construct
  source 1..50: mol_type = other DNA
actatacgaataccgaattaataatccgaaacgaaccctaaacgcacacg

SEQ ID NO: 47949 - DNA, 50 bp, synthetic construct
  source 1..50: mol_type = other DNA
tttcactttataaataaaataaaaaacaccctaaaacctacaccttccca

SEQ ID NO: 47950 - DNA, 50 bp, synthetic construct
  source 1..50: mol_type = other DNA
tttcgctttataaataaaataaaaaacaccctaaaacctacgccttcccg

SEQ ID NO: 47951 - DNA, 50 bp, synthetic construct
  source 1..50: mol_type = other DNA
ctaaacacacacaccattaataaatcctatacaaccaaaacaaaaaaaca

SEQ ID NO: 47952 - DNA, 50 bp, synthetic construct
  source 1..50: mol_type = other DNA
ctaaacgcacacgccattaataaatcctatacgaccgaaacgaaaaaacg

SEQ ID NO: 47953 - DNA, 50 bp, synthetic construct
  source 1..50: mol_type = other DNA
atacctcctattctacttacaaaacaaaacaaaaactcttacaaacaaca

SEQ ID NO: 47954 - DNA, 50 bp, synthetic construct
  source 1..50: mol_type = other DNA
atacctcctattctacttacaaaacgaaacgaaaactcttacgaacgacg

SEQ ID NO: 47955 - DNA, 50 bp, synthetic construct
  source 1..50: mol_type = other DNA
tcctattctacttacaaaacaaaacaaaaactcttacaaacaacaactca

SEQ ID NO: 47956 - DNA, 50 bp, synthetic construct
  source 1..50: mol_type = other DNA
tcctattctacttacaaaacgaaacgaaaactcttacgaacgacgactcg

SEQ ID NO: 47957 - DNA, 50 bp, synthetic construct
  source 1..50: mol_type = other DNA
acaaaaactcttacaaacaacaactcattaatctaaaaatataattctca

SEQ ID NO: 47958 - DNA, 50 bp, synthetic construct
  source 1..50: mol_type = other DNA
acgaaaactcttacgaacgacgactcgttaatctaaaaatataattctcg

SEQ ID NO: 47959 - DNA, 50 bp, synthetic construct
  source 1..50: mol_type = other DNA
tacaaacaacaactcattaatctaaaaatataattctcacttaaaataca

SEQ ID NO: 47960 - DNA, 50 bp, synthetic construct
  source 1..50: mol_type = other DNA
tacgaacgacgactcgttaatctaaaaatataattctcgcttaaaatacg

SEQ ID NO: 47961 - DNA, 50 bp, synthetic construct
  source 1..50: mol_type = other DNA
aaaatacaaaaaccacttactcattttcaatcaacaatccaacctcttca

SEQ ID NO: 47962 - DNA, 50 bp, synthetic construct
  source 1..50: mol_type = other DNA
aaaatacaaaaaccgcttactcgttttcaatcgacgatccgacctcttcg

SEQ ID NO: 47963 - DNA, 50 bp, synthetic construct
  source 1..50: mol_type = other DNA
ctcctcaaatttactaaaaacaataacaacaacaaacatataaaccaaca

SEQ ID NO: 47964 - DNA, 50 bp, synthetic construct
  source 1..50: mol_type = other DNA
ctcctcgaatttactaaaaacgataacaacgacaaacgtataaaccaacg

SEQ ID NO: 47965 - DNA, 50 bp, synthetic construct
  source 1..50: mol_type = other DNA
aaatttactaaaaacaataacaacaacaaacatataaaccaacacttaca

SEQ ID NO: 47966 - DNA, 50 bp, synthetic construct
  source 1..50: mol_type = other DNA
gaatttactaaaaacgataacaacgacaaacgtataaaccaacgcttacg

SEQ ID NO: 47967 - DNA, 50 bp, synthetic construct
  source 1..50: mol_type = other DNA
tccctacatatccaaaaaaaacacataaatttctatacacaaaaaccaca

SEQ ID NO: 47968 - DNA, 50 bp, synthetic construct
  source 1..50: mol_type = other DNA
tccctacgtatccaaaaaaaacgcgtaaatttctatacacaaaaaccacg

SEQ ID NO: 47969 - DNA, 50 bp, synthetic construct
  source 1..50: mol_type = other DNA
aaaatttctaaataacataaaaacaccatacattcttaaaaacaaaatca

SEQ ID NO: 47970 - DNA, 50 bp, synthetic construct
  source 1..50: mol_type = other DNA
aaaatttctaaataacataaaaacgccgtacgttcttaaaaacaaaatcg

SEQ ID NO: 47971 - DNA, 50 bp, synthetic construct
  source 1..50: mol_type = other DNA
aattcaaacctactaatatctcccaactttactcctaaaaacatacaaca

SEQ ID NO: 47972 - DNA, 50 bp, synthetic construct
  source 1..50: mol_type = other DNA
aattcaaacctactaatatctcccgactttactcctaaaaacgtacgacg

SEQ ID NO: 47973 - DNA, 50 bp, synthetic construct
  source 1..50: mol_type = other DNA
tcaaaaattccaaaacaaaaacaaatcccaccaataattaaaaattcaca

SEQ ID NO: 47974 - DNA, 50 bp, synthetic construct
  source 1..50: mol_type = other DNA
tcaaaaattccaaaacgaaaacgaatcccgccgataattaaaaattcgcg

SEQ ID NO: 47975 - DNA, 50 bp, synthetic construct
  source 1..50: mol_type = other DNA
aaaatacacaaaccacaaacaaaaactacacaaaaaaattaataaaaaca

SEQ ID NO: 47976 - DNA, 50 bp, synthetic construct
  source 1..50: mol_type = other DNA
aaaatacgcaaaccgcgaacgaaaactacacaaaaaaattaataaaaacg

SEQ ID NO: 47977 - DNA, 50 bp, synthetic construct
  source 1..50: mol_type = other DNA
tctccattttaaaataactacaaaaaactcacttcttaatcactacccca

SEQ ID NO: 47978 - DNA, 50 bp, synthetic construct
  source 1..50: mol_type = other DNA
tctccattttaaaataactacgaaaaactcgcttcttaatcgctaccccg

SEQ ID NO: 47979 - DNA, 50 bp, synthetic construct
  source 1..50: mol_type = other DNA
aaacaaaaaacacctcaacactacaaaaacaaaacaacaactaaaaaaca

SEQ ID NO: 47980 - DNA, 50 bp, synthetic construct
  source 1..50: mol_type = other DNA
aaacgaaaaacgcctcaacgctacaaaaacgaaacaacgactaaaaaacg

SEQ ID NO: 47981 - DNA, 50 bp, synthetic construct
  source 1..50: mol_type = other DNA
tacactcaaaaatctaacacaaaaaacaaacacttatacctaactataca

SEQ ID NO: 47982 - DNA, 50 bp, synthetic construct
  source 1..50: mol_type = other DNA
tacgctcgaaaatctaacgcgaaaaacaaacacttatacctaactatacg

SEQ ID NO: 47983 - DNA, 50 bp, synthetic construct
  source 1..50: mol_type = other DNA
acacaaaatactataaattctcaccataactcacttactatataacctca

SEQ ID NO: 47984 - DNA, 50 bp, synthetic construct
  source 1..50: mol_type = other DNA
acgcgaaatactataaattctcgccgtaactcacttactatataacctcg

SEQ ID NO: 47985 - DNA, 50 bp, synthetic construct
  source 1..50: mol_type = other DNA
aaatcccacaaaaacctaaaaaaaaccaaatcaaactacatactcttcca

SEQ ID NO: 47986 - DNA, 50 bp, synthetic construct
  source 1..50: mol_type = other DNA
aaatcccgcgaaaacctaaaaaaaaccaaatcgaactacgtactcttccg

SEQ ID NO: 47987 - DNA, 50 bp, synthetic construct
  source 1..50: mol_type = other DNA
aaaaaaccaaatcaaactacatactcttccacatacaattaaaaacaaca

SEQ ID NO: 47988 - DNA, 50 bp, synthetic construct
  source 1..50: mol_type = other DNA
aaaaaaccaaatcgaactacgtactcttccgcgtacaattaaaaacaacg

SEQ ID NO: 47989 - DNA, 50 bp, synthetic construct
  source 1..50: mol_type = other DNA
atcaaactacatactcttccacatacaattaaaaacaacacaaaaattca

SEQ ID NO: 47990 - DNA, 50 bp, synthetic construct
  source 1..50: mol_type = other DNA
atcgaactacgtactcttccgcgtacaattaaaaacaacgcaaaaattcg

SEQ ID NO: 47991 - DNA, 50 bp, synthetic construct
  source 1..50: mol_type = other DNA
aaacactaaaacaaacaattcctaaactactccaataaatttaacataca

SEQ ID NO: 47992 - DNA, 50 bp, synthetic construct
  source 1..50: mol_type = other DNA
aaacgctaaaacaaacgattcctaaactactccgataaatttaacgtacg

SEQ ID NO: 47993 - DNA, 50 bp, synthetic construct
  source 1..50: mol_type = other DNA
aaactactccaataaatttaacatacacaaatttctacaaatctaaaaca

SEQ ID NO: 47994 - DNA, 50 bp, synthetic construct
  source 1..50: mol_type = other DNA
aaactactccgataaatttaacgtacgcgaatttctacaaatctaaaacg

SEQ ID NO: 47995 - DNA, 50 bp, synthetic construct
  source 1..50: mol_type = other DNA
aataaatttaacatacacaaatttctacaaatctaaaacaaacttacaca

SEQ ID NO: 47996 - DNA, 50 bp, synthetic construct
  source 1..50: mol_type = other DNA
gataaatttaacgtacgcgaatttctacaaatctaaaacgaacttacacg

SEQ ID NO: 47997 - DNA, 50 bp, synthetic construct
  source 1..50: mol_type = other DNA
catacacaaatttctacaaatctaaaacaaacttacacattacatcacca

SEQ ID NO: 47998 - DNA, 50 bp, synthetic construct
  source 1..50: mol_type = other DNA
cgtacgcgaatttctacaaatctaaaacgaacttacacgttacatcaccg

SEQ ID NO: 47999 - DNA, 50 bp, synthetic construct
  source 1..50: mol_type = other DNA
aaacctttcttacaaaattcaccatatactccttaaaaaccacaaaatca

SEQ ID NO: 48000 - DNA, 50 bp, synthetic construct
  source 1..50: mol_type = other DNA
aaacctttcttacaaaattcgccatatactccttaaaaaccgcgaaatcg

SEQ ID NO: 48001 - DNA, 50 bp, synthetic construct
  source 1..50: mol_type = other DNA
actttattcctaaaataccatcaaaaattaaaatcaaatttcttcaatca

SEQ ID NO: 48002 - DNA, 50 bp, synthetic construct
  source 1..50: mol_type = other DNA
actttattcctaaaataccgtcgaaaattaaaatcgaatttcttcgatcg

SEQ ID NO: 48003 - DNA, 50 bp, synthetic construct
  source 1..50: mol_type = other DNA
acaataaaaaaacaactttattcctaaaataccatcaaaaattaaaatca

SEQ ID NO: 48004 - DNA, 50 bp, synthetic construct
  source 1..50: mol_type = other DNA
acgataaaaaaacaactttattcctaaaataccgtcgaaaattaaaatcg

SEQ ID NO: 48005 - DNA, 50 bp, synthetic construct
  source 1..50: mol_type = other DNA
aaccactaataattaccctcacaatcaaaaaaactcaatcctaatcctca

SEQ ID NO: 48006 - DNA, 50 bp, synthetic construct
  source 1..50: mol_type = other DNA
aaccactaataattaccctcacgatcgaaaaaactcgatcctaatcctcg

SEQ ID NO: 48007 - DNA, 50 bp, synthetic construct
  source 1..50: mol_type = other DNA
accaaaataacactaacaattaaaacaaaaactctactacaacctttaca

SEQ ID NO: 48008 - DNA, 50 bp, synthetic construct
  source 1..50: mol_type = other DNA
accaaaataacgctaacgattaaaacaaaaactctactacgacctttacg

SEQ ID NO: 48009 - DNA, 50 bp, synthetic construct
  source 1..50: mol_type = other DNA
cacataacaaccaaaataacactaacaattaaaacaaaaactctactaca

SEQ ID NO: 48010 - DNA, 50 bp, synthetic construct
  source 1..50: mol_type = other DNA
cacgtaacgaccaaaataacgctaacgattaaaacaaaaactctactacg

SEQ ID NO: 48011 - DNA, 50 bp, synthetic construct
  source 1..50: mol_type = other DNA
acaaaaaacacaaccaattaactaaaaaacaacaacccaaaaaaaacaca

SEQ ID NO: 48012 - DNA, 50 bp, synthetic construct
  source 1..50: mol_type = other DNA
acaaaaaacgcaaccgattaactaaaaaacgacaacccaaaaaaaacgcg

SEQ ID NO: 48013 - DNA, 50 bp, synthetic construct
  source 1..50: mol_type = other DNA
aaatatacaaaaaaaaccaaaaaaactacaatcccaaccttccttacaca

SEQ ID NO: 48014 - DNA, 50 bp, synthetic construct
  source 1..50: mol_type = other DNA
aaatatacaaaaaaaaccaaaaaaactacaatcccgaccttccttacgcg

SEQ ID NO: 48015 - DNA, 50 bp, synthetic construct
  source 1..50: mol_type = other DNA
cacaatcccattaaaaaacaacaaaaaataaaactaaaaaccccaaacca

SEQ ID NO: 48016 - DNA, 50 bp, synthetic construct
  source 1..50: mol_type = other DNA
cacgatcccgttaaaaaacaacgaaaaataaaactaaaaaccccaaaccg

SEQ ID NO: 48017 - DNA, 50 bp, synthetic construct
  source 1..50: mol_type = other DNA
caataaatccaaatcatctaactaaatatccactaacttactctctctca

SEQ ID NO: 48018 - DNA, 50 bp, synthetic construct
  source 1..50: mol_type = other DNA
cgataaatccaaatcgtctaactaaatatccgctaacttactctctctcg

SEQ ID NO: 48019 - DNA, 50 bp, synthetic construct
  source 1..50: mol_type = other DNA
tcatctaactaaatatccactaacttactctctctcaattatcctctcca

SEQ ID NO: 48020 - DNA, 50 bp, synthetic construct
  source 1..50: mol_type = other DNA
tcgtctaactaaatatccgctaacttactctctctcgattatcctctccg

SEQ ID NO: 48021 - DNA, 50 bp, synthetic construct
  source 1..50: mol_type = other DNA
aatccacaacccaaacccctctaaaccaataactattatcaaaaatccca

SEQ ID NO: 48022 - DNA, 50 bp, synthetic construct
  source 1..50: mol_type = other DNA
aatccacgacccaaacccctctaaaccaataactattatcaaaaatcccg

SEQ ID NO: 48023 - DNA, 50 bp, synthetic construct
  source 1..50: mol_type = other DNA
accaaccaaaacccctaacaacaactactaacccaaaaaaacttaaatca

SEQ ID NO: 48024 - DNA, 50 bp, synthetic construct
  source 1..50: mol_type = other DNA
accgaccgaaacccctaacaacaactactaacccaaaaaaacttaaatcg

SEQ ID NO: 48025 - DNA, 50 bp, synthetic construct
  source 1..50: mol_type = other DNA
actaacccaaaaaaacttaaatcataaacttaacattaaaaccaacacca

SEQ ID NO: 48026 - DNA, 50 bp, synthetic construct
  source 1..50: mol_type = other DNA
actaacccaaaaaaacttaaatcgtaaacttaacattaaaaccgacgccg

SEQ ID NO: 48027 - DNA, 50 bp, synthetic construct
  source 1..50: mol_type = other DNA
aaaaaacttaaatcataaacttaacattaaaaccaacaccaaaaaatcca

SEQ ID NO: 48028 - DNA, 50 bp, synthetic construct
  source 1..50: mol_type = other DNA
aaaaaacttaaatcgtaaacttaacattaaaaccgacgccgaaaaatccg

SEQ ID NO: 48029 - DNA, 50 bp, synthetic construct
  source 1..50: mol_type = other DNA
aaacaactctactctatactaaacaaatattacacatacccccaaaacca

SEQ ID NO: 48030 - DNA, 50 bp, synthetic construct
  source 1..50: mol_type = other DNA
aaacgactctactctatactaaacaaatattacgcgtacccccaaaaccg

SEQ ID NO: 48031 - DNA, 50 bp, synthetic construct
  source 1..50: mol_type = other DNA
aaaaaaaaaccccattcaaaaatttattcatacacctaaaaatattcaca

SEQ ID NO: 48032 - DNA, 50 bp, synthetic construct
  source 1..50: mol_type = other DNA
aaaaaaaaaccccattcgaaaatttattcgtacacctaaaaatattcacg

SEQ ID NO: 48033 - DNA, 50 bp, synthetic construct
  source 1..50: mol_type = other DNA
atatcttaaaaattataaaaataaaaacaatcaatcactatctatcctca

SEQ ID NO: 48034 - DNA, 50 bp, synthetic construct
  source 1..50: mol_type = other DNA
atatcttaaaaattataaaaataaaaacaatcgatcgctatctatcctcg

SEQ ID NO: 48035 - DNA, 50 bp, synthetic construct
  source 1..50: mol_type = other DNA
ttaaacacaaaaaacttaaccttttttaaatttaacaaaaacaaacaaca

SEQ ID NO: 48036 - DNA, 50 bp, synthetic construct
  source 1..50: mol_type = other DNA
ttaaacacaaaaaacttaaccttttttaaatttaacgaaaacaaacaacg

SEQ ID NO: 48037 - DNA, 50 bp, synthetic construct
  source 1..50: mol_type = other DNA
acccaaccctaaataaaaaaaactaatctctacccaaaatatcaaaacca

SEQ ID NO: 48038 - DNA, 50 bp, synthetic construct
  source 1..50: mol_type = other DNA
acccaaccctaaataaaaaaaactaatctctacccgaaatatcaaaaccg

SEQ ID NO: 48039 - DNA, 50 bp, synthetic construct
  source 1..50: mol_type = other DNA
caccacaaaatcccaaaaaccataataaaataaaacaactaaaaaataca

SEQ ID NO: 48040 - DNA, 50 bp, synthetic construct
  source 1..50: mol_type = other DNA
caccgcgaaatcccaaaaaccgtaataaaataaaacgactaaaaaatacg

SEQ ID NO: 48041 - DNA, 50 bp, synthetic construct
  source 1..50: mol_type = other DNA
ttaaaactcacatcacaattttcctaccaaccttataaaataaaataaca

SEQ ID NO: 48042 - DNA, 50 bp, synthetic construct
  source 1..50: mol_type = other DNA
ttaaaactcgcgtcacaattttcctaccgaccttataaaataaaataacg

SEQ ID NO: 48043 - DNA, 50 bp, synthetic construct
  source 1..50: mol_type = other DNA
caacacattactcaaccacaattctttaccaataccaaatttaaaacaca

SEQ ID NO: 48044 - DNA, 50 bp, synthetic construct
  source 1..50: mol_type = other DNA
caacgcattactcaaccacaattctttaccgataccaaatttaaaacgcg

SEQ ID NO: 48045 - DNA, 50 bp, synthetic construct
  source 1..50: mol_type = other DNA
taaaaaattttaacaaaaaaaaccccaaataaacaaaaaacaccaaaaca

SEQ ID NO: 48046 - DNA, 50 bp, synthetic construct
  source 1..50: mol_type = other DNA
taaaaaattttaacgaaaaaaaccccgaataaacgaaaaacgccgaaacg

SEQ ID NO: 48047 - DNA, 50 bp, synthetic construct
  source 1..50: mol_type = other DNA
aaccctaacaaaccatacaaaaaaatacaaaaacctaaatacaacctaca

SEQ ID NO: 48048 - DNA, 50 bp, synthetic construct
  source 1..50: mol_type = other DNA
aaccctaacgaaccgtacgaaaaaatacaaaaacctaaatacgacctacg

SEQ ID NO: 48049 - DNA, 50 bp, synthetic construct
  source 1..50: mol_type = other DNA
aaaaacaaaccctaacaaaccatacaaaaaaatacaaaaacctaaataca

SEQ ID NO: 48050 - DNA, 50 bp, synthetic construct
  source 1..50: mol_type = other DNA
aaaaacgaaccctaacgaaccgtacgaaaaaatacaaaaacctaaatacg

SEQ ID NO: 48051 - DNA, 50 bp, synthetic construct
  source 1..50: mol_type = other DNA
actaaacacaacaaacaaaaacacaaacaaacaaaaaaattaacaacaca

SEQ ID NO: 48052 - DNA, 50 bp, synthetic construct
  source 1..50: mol_type = other DNA
actaaacacgacgaacaaaaacgcgaacgaacgaaaaaattaacaacgcg

SEQ ID NO: 48053 - DNA, 50 bp, synthetic construct
  source 1..50: mol_type = other DNA
acaacaaaacccaacataatcataacaaataacccaaaacacttacaaca

SEQ ID NO: 48054 - DNA, 50 bp, synthetic construct
  source 1..50: mol_type = other DNA
acaacgaaacccaacataatcataacgaataacccgaaacacttacaacg

SEQ ID NO: 48055 - DNA, 50 bp, synthetic construct
  source 1..50: mol_type = other DNA
aacaaaacccaacataatcataacaaataacccaaaacacttacaacaca

SEQ ID NO: 48056 - DNA, 50 bp, synthetic construct
  source 1..50: mol_type = other DNA
aacgaaacccaacataatcataacgaataacccgaaacacttacaacgcg

SEQ ID NO: 48057 - DNA, 50 bp, synthetic construct
  source 1..50: mol_type = other DNA
ttcactataataaaactaaaacaacaccaaatcaccaaaacaaaaataca

SEQ ID NO: 48058 - DNA, 50 bp, synthetic construct
  source 1..50: mol_type = other DNA
ttcgctataataaaactaaaacgacaccgaatcaccaaaacgaaaatacg

SEQ ID NO: 48059 - DNA, 50 bp, synthetic construct
  source 1..50: mol_type = other DNA
tataataaaactaaaacaacaccaaatcaccaaaacaaaaatacaaccca

SEQ ID NO: 48060 - DNA, 50 bp, synthetic construct
  source 1..50: mol_type = other DNA
tataataaaactaaaacgacaccgaatcaccaaaacgaaaatacgacccg

SEQ ID NO: 48061 - DNA, 50 bp, synthetic construct
  source 1..50: mol_type = other DNA
aaactacttaccaaaaaaaacaaccacaataataaaaccaaaaaaaccca

SEQ ID NO: 48062 - DNA, 50 bp, synthetic construct
  source 1..50: mol_type = other DNA
aaactacttaccgaaaaaaacgaccgcaataataaaaccgaaaaaacccg

SEQ ID NO: 48063 - DNA, 50 bp, synthetic construct
  source 1..50: mol_type = other DNA
taccaaaaaaaacaaccacaataataaaaccaaaaaaacccaaaaaacca

SEQ ID NO: 48064 - DNA, 50 bp, synthetic construct
  source 1..50: mol_type = other DNA
taccgaaaaaaacgaccgcaataataaaaccgaaaaaacccgaaaaaccg

SEQ ID NO: 48065 - DNA, 50 bp, synthetic construct
  source 1..50: mol_type = other DNA
acaataataaaaccaaaaaaacccaaaaaaccacctcactaacaaaaaca

SEQ ID NO: 48066 - DNA, 50 bp, synthetic construct
  source 1..50: mol_type = other DNA
gcaataataaaaccgaaaaaacccgaaaaaccgcctcactaacgaaaacg

SEQ ID NO: 48067 - DNA, 50 bp, synthetic construct
  source 1..50: mol_type = other DNA
taataaaaccaaaaaaacccaaaaaaccacctcactaacaaaaacaaaca

SEQ ID NO: 48068 - DNA, 50 bp, synthetic construct
  source 1..50: mol_type = other DNA
taataaaaccgaaaaaacccgaaaaaccgcctcactaacgaaaacgaacg

SEQ ID NO: 48069 - DNA, 50 bp, synthetic construct
  source 1..50: mol_type = other DNA
aaaaatacaaaaaatcaataaacaacaaaaaaatcaaacccaaacaccca

SEQ ID NO: 48070 - DNA, 50 bp, synthetic construct
  source 1..50: mol_type = other DNA
aaaaatacaaaaaatcgataaacaacgaaaaaatcgaacccgaacacccg

SEQ ID NO: 48071 - DNA, 50 bp, synthetic construct
  source 1..50: mol_type = other DNA
cccaaataaaaaactctaaacaaaattccaaataaccaccaaaaataaca

SEQ ID NO: 48072 - DNA, 50 bp, synthetic construct
  source 1..50: mol_type = other DNA
cccgaataaaaaactctaaacgaaattccgaataaccaccgaaaataacg

SEQ ID NO: 48073 - DNA, 50 bp, synthetic construct
  source 1..50: mol_type = other DNA
tcactcaaataaaataactaatacattacaaaattttaaaacaataaaca

SEQ ID NO: 48074 - DNA, 50 bp, synthetic construct
  source 1..50: mol_type = other DNA
tcactcgaataaaataactaatacattacaaaattttaaaacgataaacg

SEQ ID NO: 48075 - DNA, 50 bp, synthetic construct
  source 1..50: mol_type = other DNA
cccaaataatataaatatcaaattaatacaataaaatttttacctcatca

SEQ ID NO: 48076 - DNA, 50 bp, synthetic construct
  source 1..50: mol_type = other DNA
cccgaataatataaatatcaaattaatacgataaaatttttacctcatcg

SEQ ID NO: 48077 - DNA, 50 bp, synthetic construct
  source 1..50: mol_type = other DNA
aaaacaaaacacatcaacccaaataacctaaacaaaaacctcataccaca

SEQ ID NO: 48078 - DNA, 50 bp, synthetic construct
  source 1..50: mol_type = other DNA
aaaacaaaacgcatcaacccaaataacctaaacaaaaacctcataccgcg

SEQ ID NO: 48079 - DNA, 50 bp, synthetic construct
  source 1..50: mol_type = other DNA
cctcctatcaataccctctccactataaaacctaaaaaccaaactatcca

SEQ ID NO: 48080 - DNA, 50 bp, synthetic construct
  source 1..50: mol_type = other DNA
cctcctatcaataccctctccactataaaacctaaaaaccgaactatccg

SEQ ID NO: 48081 - DNA, 50 bp, synthetic construct
  source 1..50: mol_type = other DNA
ttacttacataaacttccaaaaaaacaaacctatccttcctaacccaaca

SEQ ID NO: 48082 - DNA, 50 bp, synthetic construct
  source 1..50: mol_type = other DNA
ttacttacgtaaacttccaaaaaaacaaacctatccttcctaacccgacg

SEQ ID NO: 48083 - DNA, 50 bp, synthetic construct
  source 1..50: mol_type = other DNA
tcaaaaaaaaattcccacaaaacaaatacactactcatccaaattaatca

SEQ ID NO: 48084 - DNA, 50 bp, synthetic construct
  source 1..50: mol_type = other DNA
tcaaaaaaaaattcccacaaaacgaatacactactcgtccaaattaatcg

SEQ ID NO: 48085 - DNA, 50 bp, synthetic construct
  source 1..50: mol_type = other DNA
cacaaaatacccaaaaaccctttaaaatacccctaaatcccttcatctca

SEQ ID NO: 48086 - DNA, 50 bp, synthetic construct
  source 1..50: mol_type = other DNA
cgcaaaatacccaaaaaccctttaaaatacccctaaatcccttcatctcg

SEQ ID NO: 48087 - DNA, 50 bp, synthetic construct
  source 1..50: mol_type = other DNA
caaacaaacacctcaaaaaatccaaaacaaaattactaaaaaaataccca

SEQ ID NO: 48088 - DNA, 50 bp, synthetic construct
  source 1..50: mol_type = other DNA
cgaacgaacgcctcaaaaaatccgaaacaaaattactaaaaaaatacccg

SEQ ID NO: 48089 - DNA, 50 bp, synthetic construct
  source 1..50: mol_type = other DNA
aaaaaatccaaaacaaaattactaaaaaaatacccaaaaaaatcaaaaca

SEQ ID NO: 48090 - DNA, 50 bp, synthetic construct
  source 1..50: mol_type = other DNA
aaaaaatccgaaacaaaattactaaaaaaatacccgaaaaaatcgaaacg

SEQ ID NO: 48091 - DNA, 50 bp, synthetic construct
  source 1..50: mol_type = other DNA
ttactaaaaaaatacccaaaaaaatcaaaacatatcaccacaacccctca

SEQ ID NO: 48092 - DNA, 50 bp, synthetic construct
  source 1..50: mol_type = other DNA
ttactaaaaaaatacccgaaaaaatcgaaacgtatcaccacaacccctcg

SEQ ID NO: 48093 - DNA, 50 bp, synthetic construct
  source 1..50: mol_type = other DNA
aaacctacatcacaataaaaataaccaaaatactaaataaatcaaactca

SEQ ID NO: 48094 - DNA, 50 bp, synthetic construct
  source 1..50: mol_type = other DNA
aaacctacgtcgcgataaaaataaccgaaatactaaataaatcgaactcg

SEQ ID NO: 48095 - DNA, 50 bp, synthetic construct
  source 1..50: mol_type = other DNA
acaaatactaaactaaaaccaaaaacccaaaacaaaaccaactaatcaca

SEQ ID NO: 48096 - DNA, 50 bp, synthetic construct
  source 1..50: mol_type = other DNA
acaaatactaaactaaaaccgaaaacccgaaacgaaaccgactaatcgcg

SEQ ID NO: 48097 - DNA, 50 bp, synthetic construct
  source 1..50: mol_type = other DNA
atacaaatactaaactaaaaccaaaaacccaaaacaaaaccaactaatca

SEQ ID NO: 48098 - DNA, 50 bp, synthetic construct
  source 1..50: mol_type = other DNA
gtacaaatactaaactaaaaccgaaaacccgaaacgaaaccgactaatcg

SEQ ID NO: 48099 - DNA, 50 bp, synthetic construct
  source 1..50: mol_type = other DNA
ataaaaacatacaaatactaaactaaaaccaaaaacccaaaacaaaacca

SEQ ID NO: 48100 - DNA, 50 bp, synthetic construct
  source 1..50: mol_type = other DNA
ataaaaacgtacaaatactaaactaaaaccgaaaacccgaaacgaaaccg

SEQ ID NO: 48101 - DNA, 50 bp, synthetic construct
  source 1..50: mol_type = other DNA
tccacaataaaaacatacaaatactaaactaaaaccaaaaacccaaaaca

SEQ ID NO: 48102 - DNA, 50 bp, synthetic construct
  source 1..50: mol_type = other DNA
tccgcaataaaaacgtacaaatactaaactaaaaccgaaaacccgaaacg

SEQ ID NO: 48103 - DNA, 50 bp, synthetic construct
  source 1..50: mol_type = other DNA
caaactccacaataaaaacatacaaatactaaactaaaaccaaaaaccca

SEQ ID NO: 48104 - DNA, 50 bp, synthetic construct
  source 1..50: mol_type = other DNA
cgaactccgcaataaaaacgtacaaatactaaactaaaaccgaaaacccg

SEQ ID NO: 48105 - DNA, 50 bp, synthetic construct
  source 1..50: mol_type = other DNA
aataaaaataattcactatacccaatcacaattttaatcaacaaactcca

SEQ ID NO: 48106 - DNA, 50 bp, synthetic construct
  source 1..50: mol_type = other DNA
aataaaaataattcgctatacccgatcgcgattttaatcgacgaactccg

SEQ ID NO: 48107 - DNA, 50 bp, synthetic construct
  source 1..50: mol_type = other DNA
tcaatccaatacctacacatcttcattacaaaactcatcaattaaaacca

SEQ ID NO: 48108 - DNA, 50 bp, synthetic construct
  source 1..50: mol_type = other DNA
tcaatccaatacctacacgtcttcattacgaaactcgtcgattaaaaccg

SEQ ID NO: 48109 - DNA, 50 bp, synthetic construct
  source 1..50: mol_type = other DNA
ttaaacaacactattcattttctctcaccacccacattatttatcttaca

SEQ ID NO: 48110 - DNA, 50 bp, synthetic construct
  source 1..50: mol_type = other DNA
ttaaacaacactattcattttctctcaccgcccgcgttatttatcttacg

SEQ ID NO: 48111 - DNA, 50 bp, synthetic construct
  source 1..50: mol_type = other DNA
attcaccatatttaccaaactaatctcaaattcctaacctcaaacaatca

SEQ ID NO: 48112 - DNA, 50 bp, synthetic construct
  source 1..50: mol_type = other DNA
attcgccatatttaccaaactaatctcgaattcctaacctcaaacaatcg

SEQ ID NO: 48113 - DNA, 50 bp, synthetic construct
  source 1..50: mol_type = other DNA
ccatatttaccaaactaatctcaaattcctaacctcaaacaatcaaccca

SEQ ID NO: 48114 - DNA, 50 bp, synthetic construct
  source 1..50: mol_type = other DNA
ccatatttaccaaactaatctcgaattcctaacctcaaacaatcgacccg

SEQ ID NO: 48115 - DNA, 50 bp, synthetic construct
  source 1..50: mol_type = other DNA
tccccataataaaacaaaaaaatcaaacttaacaaaactcaaaacaaaca

SEQ ID NO: 48116 - DNA, 50 bp, synthetic construct
  source 1..50: mol_type = other DNA
tccccgtaataaaacgaaaaaatcaaacttaacaaaactcaaaacaaacg

SEQ ID NO: 48117 - DNA, 50 bp, synthetic construct
  source 1..50: mol_type = other DNA
catatataaaaaaataaactaacctaaaccctccccatacccccaaaaca

SEQ ID NO: 48118 - DNA, 50 bp, synthetic construct
  source 1..50: mol_type = other DNA
catatataaaaaaataaactaacctaaaccctccccgtacccccaaaacg

SEQ ID NO: 48119 - DNA, 50 bp, synthetic construct
  source 1..50: mol_type = other DNA
gtttgttttgagttttgttaagtttgatttttttgttttattatggggat

SEQ ID NO: 48120 - DNA, 50 bp, synthetic construct
  source 1..50: mol_type = other DNA
gtttgttttgagttttgttaagtttgattttttcgttttattacggggac

SEQ ID NO: 48121 - DNA, 50 bp, synthetic construct
  source 1..50: mol_type = other DNA
aaaacacaaccaaaaaaaacaacctcccctacaaatcctactcaaaatca

SEQ ID NO: 48122 - DNA, 50 bp, synthetic construct
  source 1..50: mol_type = other DNA
aaaacacaaccgaaaaaaacgacctcccctacaaatcctactcaaaatcg

SEQ ID NO: 48123 - DNA, 50 bp, synthetic construct
  source 1..50: mol_type = other DNA
caaacttactatttcacaacctaacccccaacctatatacctcattacca

SEQ ID NO: 48124 - DNA, 50 bp, synthetic construct
  source 1..50: mol_type = other DNA
caaacttactatttcgcaacctaacccccaacctatatacctcattaccg

SEQ ID NO: 48125 - DNA, 50 bp, synthetic construct
  source 1..50: mol_type = other DNA
aatacaaaccactaaccaacctcttaaaacctcccatttcctttccatca

SEQ ID NO: 48126 - DNA, 50 bp, synthetic construct
  source 1..50: mol_type = other DNA
aatacaaaccactaaccgacctcttaaaacctcccatttcctttccatcg

SEQ ID NO: 48127 - DNA, 50 bp, synthetic construct
  source 1..50: mol_type = other DNA
cattattaaatcccacaattaccattattcctaacccaaacttcaatcca

SEQ ID NO: 48128 - DNA, 50 bp, synthetic construct
  source 1..50: mol_type = other DNA
cgttattaaatcccacaattaccattattcctaacccgaacttcaatccg

SEQ ID NO: 48129 - DNA, 50 bp, synthetic construct
  source 1..50: mol_type = other DNA
cctaacacatatactttctactccctaactccttcaactatactcactca

SEQ ID NO: 48130 - DNA, 50 bp, synthetic construct
  source 1..50: mol_type = other DNA
cctaacgcatatactttctactccctaactccttcaactatactcactcg

SEQ ID NO: 48131 - DNA, 50 bp, synthetic construct
  source 1..50: mol_type = other DNA
ttcaacatattaaccaaactaatcttaaacaactaaactcaaataatcca

SEQ ID NO: 48132 - DNA, 50 bp, synthetic construct
  source 1..50: mol_type = other DNA
ttcgacatattaaccaaactaatcttaaacaactaaactcaaataatccg

SEQ ID NO: 48133 - DNA, 50 bp, synthetic construct
  source 1..50: mol_type = other DNA
acatattaaccaaactaatcttaaacaactaaactcaaataatccaccca

SEQ ID NO: 48134 - DNA, 50 bp, synthetic construct
  source 1..50: mol_type = other DNA
acatattaaccaaactaatcttaaacaactaaactcaaataatccgcccg

SEQ ID NO: 48135 - DNA, 50 bp, synthetic construct
  source 1..50: mol_type = other DNA
caaaataaaactctatctcaaaaataataaaccaaacataataacttaca

SEQ ID NO: 48136 - DNA, 50 bp, synthetic construct
  source 1..50: mol_type = other DNA
caaaataaaactctatctcaaaaataataaaccgaacgtaataacttacg

SEQ ID NO: 48137 - DNA, 50 bp, synthetic construct
  source 1..50: mol_type = other DNA
aaaacaacaaaaacatactatattaaaaaactcaatttaaaaacaaacca

SEQ ID NO: 48138 - DNA, 50 bp, synthetic construct
  source 1..50: mol_type = other DNA
aaaacgacaaaaacatactatattaaaaaactcgatttaaaaacaaaccg

SEQ ID NO: 48139 - DNA, 50 bp, synthetic construct
  source 1..50: mol_type = other DNA
caaaacaaccctataaaaaacaacaaaaacatactatattaaaaaactca

SEQ ID NO: 48140 - DNA, 50 bp, synthetic construct
  source 1..50: mol_type = other DNA
cgaaacgaccctataaaaaacgacaaaaacatactatattaaaaaactcg

SEQ ID NO: 48141 - DNA, 50 bp, synthetic construct
  source 1..50: mol_type = other DNA
caacaaaatcaacaaaaaaaacaaactaaatactcaaaataactttatca

SEQ ID NO: 48142 - DNA, 50 bp, synthetic construct
  source 1..50: mol_type = other DNA
caacaaaatcgacaaaaaaaacaaactaaatactcgaaataactttatcg

SEQ ID NO: 48143 - DNA, 50 bp, synthetic construct
  source 1..50: mol_type = other DNA
ataaaactactccaaatacttaacctattcctcctaccaaccctactaca

SEQ ID NO: 48144 - DNA, 50 bp, synthetic construct
  source 1..50: mol_type = other DNA
ataaaactactccgaatacttaacctattcctcctaccgaccctactacg

SEQ ID NO: 48145 - DNA, 50 bp, synthetic construct
  source 1..50: mol_type = other DNA
aaaatcaaaatcaacaatactttaaaaactataaaaaaccccccaaacca

SEQ ID NO: 48146 - DNA, 50 bp, synthetic construct
  source 1..50: mol_type = other DNA
aaaatcgaaatcaacgatactttaaaaactataaaaaaccccccgaaccg

SEQ ID NO: 48147 - DNA, 50 bp, synthetic construct
  source 1..50: mol_type = other DNA
caaacccaaatcacaaaacttaaaataaaataataaaatcaaaatcaaca

SEQ ID NO: 48148 - DNA, 50 bp, synthetic construct
  source 1..50: mol_type = other DNA
cgaacccgaatcgcgaaacttaaaataaaataataaaatcgaaatcaacg

SEQ ID NO: 48149 - DNA, 50 bp, synthetic construct
  source 1..50: mol_type = other DNA
aaataccaaacaaaaataacctcattaataaaacacaaacccaaatcaca

SEQ ID NO: 48150 - DNA, 50 bp, synthetic construct
  source 1..50: mol_type = other DNA
aaataccgaacgaaaataacctcgttaataaaacacgaacccgaatcgcg

SEQ ID NO: 48151 - DNA, 50 bp, synthetic construct
  source 1..50: mol_type = other DNA
aaaaataccaaacaaaaataacctcattaataaaacacaaacccaaatca

SEQ ID NO: 48152 - DNA, 50 bp, synthetic construct
  source 1..50: mol_type = other DNA
gaaaataccgaacgaaaataacctcgttaataaaacacgaacccgaatcg

SEQ ID NO: 48153 - DNA, 50 bp, synthetic construct
  source 1..50: mol_type = other DNA
aaaccaaaaataccaaacaaaaataacctcattaataaaacacaaaccca

SEQ ID NO: 48154 - DNA, 50 bp, synthetic construct
  source 1..50: mol_type = other DNA
aaaccgaaaataccgaacgaaaataacctcgttaataaaacacgaacccg

SEQ ID NO: 48155 - DNA, 50 bp, synthetic construct
  source 1..50: mol_type = other DNA
aataaaaaaccaaaaataccaaacaaaaataacctcattaataaaacaca

SEQ ID NO: 48156 - DNA, 50 bp, synthetic construct
  source 1..50: mol_type = other DNA
aataaaaaaccgaaaataccgaacgaaaataacctcgttaataaaacacg

SEQ ID NO: 48157 - DNA, 50 bp, synthetic construct
  source 1..50: mol_type = other DNA
caaacaactactcaaaaacaaaaaactaacctaacttctccaactaacca

SEQ ID NO: 48158 - DNA, 50 bp, synthetic construct
  source 1..50: mol_type = other DNA
cgaacaactactcgaaaacaaaaaactaacctaacttctccaactaaccg

SEQ ID NO: 48159 - DNA, 50 bp, synthetic construct
  source 1..50: mol_type = other DNA
aaaaaaactccaaaaaatacacaaaaaacactacacaataaaacaaaaca

SEQ ID NO: 48160 - DNA, 50 bp, synthetic construct
  source 1..50: mol_type = other DNA
aaaaaaactccaaaaaatacgcgaaaaacgctacgcgataaaacgaaacg

SEQ ID NO: 48161 - DNA, 50 bp, synthetic construct
  source 1..50: mol_type = other DNA
aaaatacacaaaaaacactacacaataaaacaaaacaaacctataaaaca

SEQ ID NO: 48162 - DNA, 50 bp, synthetic construct
  source 1..50: mol_type = other DNA
aaaatacgcgaaaaacgctacgcgataaaacgaaacgaacctataaaacg

SEQ ID NO: 48163 - DNA, 50 bp, synthetic construct
  source 1..50: mol_type = other DNA
aatacacaaaaaacactacacaataaaacaaaacaaacctataaaacaca

SEQ ID NO: 48164 - DNA, 50 bp, synthetic construct
  source 1..50: mol_type = other DNA
aatacgcgaaaaacgctacgcgataaaacgaaacgaacctataaaacgcg

SEQ ID NO: 48165 - DNA, 50 bp, synthetic construct
  source 1..50: mol_type = other DNA
aacctataaaacacacctaacaacaaataaactccaaacttaaaaataca

SEQ ID NO: 48166 - DNA, 50 bp, synthetic construct
  source 1..50: mol_type = other DNA
aacctataaaacgcgcctaacgacgaataaactccgaacttaaaaatacg

SEQ ID NO: 48167 - DNA, 50 bp, synthetic construct
  source 1..50: mol_type = other DNA
tccaaacttaaaaatacacctaaaaacactaattataaaaaaaaacacca

SEQ ID NO: 48168 - DNA, 50 bp, synthetic construct
  source 1..50: mol_type = other DNA
tccgaacttaaaaatacgcctaaaaacgctaattataaaaaaaaacaccg

SEQ ID NO: 48169 - DNA, 50 bp, synthetic construct
  source 1..50: mol_type = other DNA
ccaaacttaaaaatacacctaaacaaaaaaaatcttcaaacataaaaaca

SEQ ID NO: 48170 - DNA, 50 bp, synthetic construct
  source 1..50: mol_type = other DNA
ccgaacttaaaaatacacctaaacgaaaaaaatcttcgaacataaaaacg

SEQ ID NO: 48171 - DNA, 50 bp, synthetic construct
  source 1..50: mol_type = other DNA
aaacttaaaaatacacctaaacaaaaaaaatcttcaaacataaaaacaca

SEQ ID NO: 48172 - DNA, 50 bp, synthetic construct
  source 1..50: mol_type = other DNA
gaacttaaaaatacacctaaacgaaaaaaatcttcgaacataaaaacgcg

SEQ ID NO: 48173 - DNA, 50 bp, synthetic construct
  source 1..50: mol_type = other DNA
aaaaatacacctaaacaaaaaaaatcttcaaacataaaaacacacctaca

SEQ ID NO: 48174 - DNA, 50 bp, synthetic construct
  source 1..50: mol_type = other DNA
aaaaatacacctaaacgaaaaaaatcttcgaacataaaaacgcgcctacg

SEQ ID NO: 48175 - DNA, 50 bp, synthetic construct
  source 1..50: mol_type = other DNA
aatcttcaaacataaaaacacacctacaaataatataaaaaaatacacca

SEQ ID NO: 48176 - DNA, 50 bp, synthetic construct
  source 1..50: mol_type = other DNA
aatcttcgaacataaaaacgcgcctacgaataatataaaaaaatacaccg

SEQ ID NO: 48177 - DNA, 50 bp, synthetic construct
  source 1..50: mol_type = other DNA
cacacctacaaataatataaaaaaatacaccaaacttaaaaatacaccca

SEQ ID NO: 48178 - DNA, 50 bp, synthetic construct
  source 1..50: mol_type = other DNA
cgcgcctacgaataatataaaaaaatacaccgaacttaaaaatacgcccg

SEQ ID NO: 48179 - DNA, 50 bp, synthetic construct
  source 1..50: mol_type = other DNA
acccaaaaaactctcatataaaaaataccaaacttaaaaacacccctaca

SEQ ID NO: 48180 - DNA, 50 bp, synthetic construct
  source 1..50: mol_type = other DNA
gcccgaaaaactctcatataaaaaataccaaacttaaaaacgcccctacg

SEQ ID NO: 48181 - DNA, 50 bp, synthetic construct
  source 1..50: mol_type = other DNA
taaaaaataccaaacttaaaaacacccctacaaaaaacacaaaaacacca

SEQ ID NO: 48182 - DNA, 50 bp, synthetic construct
  source 1..50: mol_type = other DNA
taaaaaataccaaacttaaaaacgcccctacgaaaaacgcaaaaacaccg

SEQ ID NO: 48183 - DNA, 50 bp, synthetic construct
  source 1..50: mol_type = other DNA
cttaaaaacacccctacaaaaaacacaaaaacaccaaacttaaaaataca

SEQ ID NO: 48184 - DNA, 50 bp, synthetic construct
  source 1..50: mol_type = other DNA
cttaaaaacgcccctacgaaaaacgcaaaaacaccgaacttaaaaatacg

SEQ ID NO: 48185 - DNA, 50 bp, synthetic construct
  source 1..50: mol_type = other DNA
acaaaaaacacaaaaacaccaaacttaaaaatacacctcaaaaatctaca

SEQ ID NO: 48186 - DNA, 50 bp, synthetic construct
  source 1..50: mol_type = other DNA
acgaaaaacgcaaaaacaccgaacttaaaaatacgcctcgaaaatctacg

SEQ ID NO: 48187 - DNA, 50 bp, synthetic construct
  source 1..50: mol_type = other DNA
aaatacacctcaaaaatctacaaaaaaaaaacaccaaacttaaacataca

SEQ ID NO: 48188 - DNA, 50 bp, synthetic construct
  source 1..50: mol_type = other DNA
aaatacgcctcgaaaatctacgaaaaaaaaacaccgaacttaaacgtacg

SEQ ID NO: 48189 - DNA, 50 bp, synthetic construct
  source 1..50: mol_type = other DNA
aaaaaaacaccaaacttaaacatacaccaaaaaaaaacaacaaaaaacca

SEQ ID NO: 48190 - DNA, 50 bp, synthetic construct
  source 1..50: mol_type = other DNA
aaaaaaacaccgaacttaaacgtacgccgaaaaaaaacgacgaaaaaccg

SEQ ID NO: 48191 - DNA, 50 bp, synthetic construct
  source 1..50: mol_type = other DNA
aaaaccaaactataaaaacatatcttaaaaaacctatctaaaaaaaacca

SEQ ID NO: 48192 - DNA, 50 bp, synthetic construct
  source 1..50: mol_type = other DNA
aaaaccgaactataaaaacgtatcttaaaaaacctatctaaaaaaaaccg

SEQ ID NO: 48193 - DNA, 50 bp, synthetic construct
  source 1..50: mol_type = other DNA
aactataaaataaaaaattaataaaacacaaccatcttctcctaccctca

SEQ ID NO: 48194 - DNA, 50 bp, synthetic construct
  source 1..50: mol_type = other DNA
aactataaaataaaaaattaataaaacgcaaccgtcttctcctaccctcg

SEQ ID NO: 48195 - DNA, 50 bp, synthetic construct
  source 1..50: mol_type = other DNA
tttacccaaactaaatacaataacacaatcttaactcaccacaacctcca

SEQ ID NO: 48196 - DNA, 50 bp, synthetic construct
  source 1..50: mol_type = other DNA
tttacccaaactaaatacaataacacgatcttaactcaccgcaacctccg

SEQ ID NO: 48197 - DNA, 50 bp, synthetic construct
  source 1..50: mol_type = other DNA
ttcactctttttacccaaactaaatacaataacacaatcttaactcacca

SEQ ID NO: 48198 - DNA, 50 bp, synthetic construct
  source 1..50: mol_type = other DNA
ttcgctctttttacccaaactaaatacaataacacgatcttaactcaccg

SEQ ID NO: 48199 - DNA, 50 bp, synthetic construct
  source 1..50: mol_type = other DNA
ttattttctcataaaaataaaatcttactatattactcaaactaatctca

SEQ ID NO: 48200 - DNA, 50 bp, synthetic construct
  source 1..50: mol_type = other DNA
ttattttctcgtaaaaataaaatcttactatattactcaaactaatctcg

SEQ ID NO: 48201 - DNA, 50 bp, synthetic construct
  source 1..50: mol_type = other DNA
aaccaatctaataactcacaaccaacacaaccataaactacccactaaca

SEQ ID NO: 48202 - DNA, 50 bp, synthetic construct
  source 1..50: mol_type = other DNA
aaccaatctaataactcacaaccgacacaaccataaactacccgctaacg

SEQ ID NO: 48203 - DNA, 50 bp, synthetic construct
  source 1..50: mol_type = other DNA
cctatcaccaaaaccctatctaaaattctaacatcctttaccaaaatcca

SEQ ID NO: 48204 - DNA, 50 bp, synthetic construct
  source 1..50: mol_type = other DNA
cctatcgccgaaaccctatctaaaattctaacatcctttaccaaaatccg

SEQ ID NO: 48205 - DNA, 50 bp, synthetic construct
  source 1..50: mol_type = other DNA
aaacacctcccacaaccaacataactcaaaccttaaaatcctaaaattca

SEQ ID NO: 48206 - DNA, 50 bp, synthetic construct
  source 1..50: mol_type = other DNA
aaacacctcccgcgaccaacataactcaaaccttaaaatcctaaaattcg

SEQ ID NO: 48207 - DNA, 50 bp, synthetic construct
  source 1..50: mol_type = other DNA
aacaataaacataaacaacataaacaataaccaaataacaatccacaaca

SEQ ID NO: 48208 - DNA, 50 bp, synthetic construct
  source 1..50: mol_type = other DNA
aacgataaacataaacgacgtaaacaataaccaaataacgatccacgacg

SEQ ID NO: 48209 - DNA, 50 bp, synthetic construct
  source 1..50: mol_type = other DNA
aataacaataaacataaacaacataaacaataaccaaataacaatccaca

SEQ ID NO: 48210 - DNA, 50 bp, synthetic construct
  source 1..50: mol_type = other DNA
gataacgataaacataaacgacgtaaacaataaccaaataacgatccacg

SEQ ID NO: 48211 - DNA, 50 bp, synthetic construct
  source 1..50: mol_type = other DNA
aaacaacaataacaataaacataaacaacataaacaataaccaaataaca

SEQ ID NO: 48212 - DNA, 50 bp, synthetic construct
  source 1..50: mol_type = other DNA
aaacgacgataacgataaacataaacgacgtaaacaataaccaaataacg

SEQ ID NO: 48213 - DNA, 50 bp, synthetic construct
  source 1..50: mol_type = other DNA
ataaaccaaacatacatttctacttaattctcttaaaaaaaaatacaaca

SEQ ID NO: 48214 - DNA, 50 bp, synthetic construct
  source 1..50: mol_type = other DNA
ataaaccaaacatacgtttctacttaattctcttaaaaaaaaatacaacg

SEQ ID NO: 48215 - DNA, 50 bp, synthetic construct
  source 1..50: mol_type = other DNA
aaacaaaaacacatacctaattcacctcccaattcctctaccatataaca

SEQ ID NO: 48216 - DNA, 50 bp, synthetic construct
  source 1..50: mol_type = other DNA
aaacaaaaacgcatacctaattcacctcccgattcctctaccatataacg

SEQ ID NO: 48217 - DNA, 50 bp, synthetic construct
  source 1..50: mol_type = other DNA
aacaaacacaaaacaacttcctacaattccatctaaataacatcctcaca

SEQ ID NO: 48218 - DNA, 50 bp, synthetic construct
  source 1..50: mol_type = other DNA
aacaaacacgaaacaacttcctacgattccatctaaataacatcctcacg

SEQ ID NO: 48219 - DNA, 50 bp, synthetic construct
  source 1..50: mol_type = other DNA
ttttaggaagttgtgttttgtttttgtgaggatgttatttagatggaatt

SEQ ID NO: 48220 - DNA, 50 bp, synthetic construct
  source 1..50: mol_type = other DNA
ttttaggaagtcgtgttttgttttcgtgaggatgttatttagatggaatc

SEQ ID NO: 48221 - DNA, 50 bp, synthetic construct
  source 1..50: mol_type = other DNA
cctacccccataaaaatatcactcaaataaaaccacaaaaaactactcca

SEQ ID NO: 48222 - DNA, 50 bp, synthetic construct
  source 1..50: mol_type = other DNA
cctacccccgtaaaaatatcactcaaataaaaccgcaaaaaactactccg

SEQ ID NO: 48223 - DNA, 50 bp, synthetic construct
  source 1..50: mol_type = other DNA
aaaactactccatacttatttactcacctaaaatataaaaaacccatcca

SEQ ID NO: 48224 - DNA, 50 bp, synthetic construct
  source 1..50: mol_type = other DNA
aaaactactccgtacttatttactcacctaaaatataaaaaacccgtccg

SEQ ID NO: 48225 - DNA, 50 bp, synthetic construct
  source 1..50: mol_type = other DNA
acctattatcaaccccaaaaaaaacactaaacctaaccaataataaacca

SEQ ID NO: 48226 - DNA, 50 bp, synthetic construct
  source 1..50: mol_type = other DNA
acctattatcaaccccaaaaaaaacgctaaacctaaccgataataaaccg

SEQ ID NO: 48227 - DNA, 50 bp, synthetic construct
  source 1..50: mol_type = other DNA
aaaataaaacacaaaaaacctcaaccaaaaaactaccctaccacctccca

SEQ ID NO: 48228 - DNA, 50 bp, synthetic construct
  source 1..50: mol_type = other DNA
aaaataaaacgcaaaaaacctcaaccaaaaaactaccctaccacctcccg

SEQ ID NO: 48229 - DNA, 50 bp, synthetic construct
  source 1..50: mol_type = other DNA
aaaactaatttttaaaaattcaacacttactatccaatttttttacaaca

SEQ ID NO: 48230 - DNA, 50 bp, synthetic construct
  source 1..50: mol_type = other DNA
aaaactaatttttaaaaattcgacacttactatccaatttttttacgacg

SEQ ID NO: 48231 - DNA, 50 bp, synthetic construct
  source 1..50: mol_type = other DNA
ccctaacacacattttcaaaattccacaaaacttaaaaaacacaacaaca

SEQ ID NO: 48232 - DNA, 50 bp, synthetic construct
  source 1..50: mol_type = other DNA
ccctaacgcacattttcgaaattccacaaaacttaaaaaacgcgacaacg

SEQ ID NO: 48233 - DNA, 50 bp, synthetic construct
  source 1..50: mol_type = other DNA
aacaataaaacaaacaaacaccaaaaaaataacataacccaaacaaacca

SEQ ID NO: 48234 - DNA, 50 bp, synthetic construct
  source 1..50: mol_type = other DNA
aacgataaaacgaacaaacgccgaaaaaataacgtaacccaaacgaaccg

SEQ ID NO: 48235 - DNA, 50 bp, synthetic construct
  source 1..50: mol_type = other DNA
aaattcaaaaaaaataaatccacctaaacctaacttccacacaataccca

SEQ ID NO: 48236 - DNA, 50 bp, synthetic construct
  source 1..50: mol_type = other DNA
aaattcaaaaaaaataaatccgcctaaacctaacttccacgcgatacccg

SEQ ID NO: 48237 - DNA, 50 bp, synthetic construct
  source 1..50: mol_type = other DNA
aatatttattctaaaattactctttctaaaaataattttctaaaaactca

SEQ ID NO: 48238 - DNA, 50 bp, synthetic construct
  source 1..50: mol_type = other DNA
aatatttattctaaaattactctttctaaaaataattttctaaaaactcg

SEQ ID NO: 48239 - DNA, 50 bp, synthetic construct
  source 1..50: mol_type = other DNA
tttctaaaaactcaccctaatcaactaaaaaacacacaaacaaaataaca

SEQ ID NO: 48240 - DNA, 50 bp, synthetic construct
  source 1..50: mol_type = other DNA
tttctaaaaactcgccctaatcgactaaaaaacacacaaacgaaataacg

SEQ ID NO: 48241 - DNA, 50 bp, synthetic construct
  source 1..50: mol_type = other DNA
cttctccaaaaataaatatatctaacctaccacaattcccataaacacca

SEQ ID NO: 48242 - DNA, 50 bp, synthetic construct
  source 1..50: mol_type = other DNA
cttctccaaaaataaatatatctaacctaccacgattcccgtaaacaccg

SEQ ID NO: 48243 - DNA, 50 bp, synthetic construct
  source 1..50: mol_type = other DNA
ttatatgttgtagttggttttttaggatgaagatagagtaaggggtaggt

SEQ ID NO: 48244 - DNA, 50 bp, synthetic construct
  source 1..50: mol_type = other DNA
ttatatgttgtagttggttttttaggatgaagatagagtaaggggtaggc

SEQ ID NO: 48245 - DNA, 50 bp, synthetic construct
  source 1..50: mol_type = other DNA
tatatatactatcaccataaaaatatttacttaattaaacacaaacacca

SEQ ID NO: 48246 - DNA, 50 bp, synthetic construct
  source 1..50: mol_type = other DNA
tatatatactatcaccataaaaatatttacttaattaaacacaaacaccg

SEQ ID NO: 48247 - DNA, 50 bp, synthetic construct
  source 1..50: mol_type = other DNA
attctcctaaaaaattttaaaaacaaaatcaaaaaaccataaattctaca

SEQ ID NO: 48248 - DNA, 50 bp, synthetic construct
  source 1..50: mol_type = other DNA
attctcctaaaaaattttaaaaacaaaatcaaaaaaccataaattctacg

SEQ ID NO: 48249 - DNA, 50 bp, synthetic construct
  source 1..50: mol_type = other DNA
acatcatcttcaacactaactataaataaataaaaatattccattctaca

SEQ ID NO: 48250 - DNA, 50 bp, synthetic construct
  source 1..50: mol_type = other DNA
acatcatcttcaacactaactataaataaataaaaatattccattctacg

SEQ ID NO: 48251 - DNA, 50 bp, synthetic construct
  source 1..50: mol_type = other DNA
ataaacacctccctacccttctctcaattttcactaatacatttaaacca

SEQ ID NO: 48252 - DNA, 50 bp, synthetic construct
  source 1..50: mol_type = other DNA
gtaaacacctccctacccttctctcaattttcactaatacatttaaaccg

SEQ ID NO: 48253 - DNA, 50 bp, synthetic construct
  source 1..50: mol_type = other DNA
aaaaaataacaacacaaattattaacaaaataaactaaacaacaaaacca

SEQ ID NO: 48254 - DNA, 50 bp, synthetic construct
  source 1..50: mol_type = other DNA
aaaaaataacaacgcaaattattaacaaaataaactaaacaacaaaaccg

SEQ ID NO: 48255 - DNA, 50 bp, synthetic construct
  source 1..50: mol_type = other DNA
ttttaaattttttcaaaatacaataaatcattaattaacccatcttcaca

SEQ ID NO: 48256 - DNA, 50 bp, synthetic construct
  source 1..50: mol_type = other DNA
ttttaaattttttcaaaatacaataaatcattaattaacccatcttcacg

SEQ ID NO: 48257 - DNA, 50 bp, synthetic construct
  source 1..50: mol_type = other DNA
caccatcaacaaaaaaaccaaaactaattatcaaaatacaaaccacaaca

SEQ ID NO: 48258 - DNA, 50 bp, synthetic construct
  source 1..50: mol_type = other DNA
caccatcaacaaaaaaaccaaaactaattatcaaaatacaaaccacaacg

SEQ ID NO: 48259 - DNA, 50 bp, synthetic construct
  source 1..50: mol_type = other DNA
acacttatctctatcaattcccctatcttcaaatttctcctccaataaca

SEQ ID NO: 48260 - DNA, 50 bp, synthetic construct
  source 1..50: mol_type = other DNA
gcacttatctctatcaattcccctatcttcaaatttctcctccaataacg

SEQ ID NO: 48261 - DNA, 50 bp, synthetic construct
  source 1..50: mol_type = other DNA
taacaaataattactataaaacttcattaaacactaaatttaatctaaca

SEQ ID NO: 48262 - DNA, 50 bp, synthetic construct
  source 1..50: mol_type = other DNA
taacaaataattactataaaacttcattaaacgctaaatttaatctaacg

SEQ ID NO: 48263 - DNA, 50 bp, synthetic construct
  source 1..50: mol_type = other DNA
caatataaccttctaaaaaaaacccaaaacccttcaaaaaataatataca

SEQ ID NO: 48264 - DNA, 50 bp, synthetic construct
  source 1..50: mol_type = other DNA
caatataaccttctaaaaaaaacccaaaacccttcaaaaaataatatacg

SEQ ID NO: 48265 - DNA, 50 bp, synthetic construct
  source 1..50: mol_type = other DNA
ccattaattctaaaattacatacactcccaataatcctcactaaacccca

SEQ ID NO: 48266 - DNA, 50 bp, synthetic construct
  source 1..50: mol_type = other DNA
ccattaattctaaaattacatacactcccaataatcctcgctaaaccccg

SEQ ID NO: 48267 - DNA, 50 bp, synthetic construct
  source 1..50: mol_type = other DNA
tttttgttatatttttgttatgggggtttgtttgggttgtagttagtttt

SEQ ID NO: 48268 - DNA, 50 bp, synthetic construct
  source 1..50: mol_type = other DNA
tttttgttatatttttgttacgggggtttgtttgggttgtagttagtttc

SEQ ID NO: 48269 - DNA, 50 bp, synthetic construct
  source 1..50: mol_type = other DNA
aaaacaccttcccatcctaaatatataaataaatctttaacctcccacca

SEQ ID NO: 48270 - DNA, 50 bp, synthetic construct
  source 1..50: mol_type = other DNA
gaaacgccttcccgtcctaaatatataaataaatctttaacctcccaccg

SEQ ID NO: 48271 - DNA, 50 bp, synthetic construct
  source 1..50: mol_type = other DNA
caaacaataaaaaaccaaaaattcatccatacactcaaaacaaaaaaaca

SEQ ID NO: 48272 - DNA, 50 bp, synthetic construct
  source 1..50: mol_type = other DNA
caaacgataaaaaaccaaaaattcatccatacactcaaaacgaaaaaacg

SEQ ID NO: 48273 - DNA, 50 bp, synthetic construct
  source 1..50: mol_type = other DNA
aataaaaaaccaaaaattcatccatacactcaaaacaaaaaaacacccca

SEQ ID NO: 48274 - DNA, 50 bp, synthetic construct
  source 1..50: mol_type = other DNA
gataaaaaaccaaaaattcatccatacactcaaaacgaaaaaacgccccg

SEQ ID NO: 48275 - DNA, 50 bp, synthetic construct
  source 1..50: mol_type = other DNA
tcataattaaccctaaattccaaaccccaatttcattaaataaacaatca

SEQ ID NO: 48276 - DNA, 50 bp, synthetic construct
  source 1..50: mol_type = other DNA
tcgtaattaaccctaaattccgaaccccaatttcattaaataaacgatcg

SEQ ID NO: 48277 - DNA, 50 bp, synthetic construct
  source 1..50: mol_type = other DNA
ccatctttaaaatactaccaaaacaattacaacccctcaccttatccaca

SEQ ID NO: 48278 - DNA, 50 bp, synthetic construct
  source 1..50: mol_type = other DNA
ccatctttaaaatactaccaaaacgattacgacccctcaccttatccacg

SEQ ID NO: 48279 - DNA, 50 bp, synthetic construct
  source 1..50: mol_type = other DNA
atctcataaaactatcaaataaaacatcacaatcaaaatcctcaacctca

SEQ ID NO: 48280 - DNA, 50 bp, synthetic construct
  source 1..50: mol_type = other DNA
atctcataaaactatcaaataaaacatcgcgatcgaaatcctcaacctcg

SEQ ID NO: 48281 - DNA, 50 bp, synthetic construct
  source 1..50: mol_type = other DNA
aaaactatcaaataaaacatcacaatcaaaatcctcaacctcacttaaca

SEQ ID NO: 48282 - DNA, 50 bp, synthetic construct
  source 1..50: mol_type = other DNA
aaaactatcaaataaaacatcgcgatcgaaatcctcaacctcgcttaacg

SEQ ID NO: 48283 - DNA, 50 bp, synthetic construct
  source 1..50: mol_type = other DNA
ttttttctaaaaaatctcctactttcactacaatcccacttaacaaccca

SEQ ID NO: 48284 - DNA, 50 bp, synthetic construct
  source 1..50: mol_type = other DNA
ttttttctaaaaaatctcctactttcactacgatcccgcttaacgacccg

SEQ ID NO: 48285 - DNA, 50 bp, synthetic construct
  source 1..50: mol_type = other DNA
tctaaaaaacataccctacctaaaaccctaccctataacccaaaatatca

SEQ ID NO: 48286 - DNA, 50 bp, synthetic construct
  source 1..50: mol_type = other DNA
tctaaaaaacataccctacctaaaaccctaccctataacccaaaatatcg

SEQ ID NO: 48287 - DNA, 50 bp, synthetic construct
  source 1..50: mol_type = other DNA
acctacctaacaaaaaacaaaaaatcaccctaattcttacaactaaacca

SEQ ID NO: 48288 - DNA, 50 bp, synthetic construct
  source 1..50: mol_type = other DNA
acctacctaacgaaaaacgaaaaatcaccctaattcttacgactaaaccg

SEQ ID NO: 48289 - DNA, 50 bp, synthetic construct
  source 1..50: mol_type = other DNA
aaaaaacccacctacctaacaaaaaacaaaaaatcaccctaattcttaca

SEQ ID NO: 48290 - DNA, 50 bp, synthetic construct
  source 1..50: mol_type = other DNA
gaaaaacccacctacctaacgaaaaacgaaaaatcaccctaattcttacg

SEQ ID NO: 48291 - DNA, 50 bp, synthetic construct
  source 1..50: mol_type = other DNA
taacctccctatctccaataaaacctaaattacaacaaccaaaactccca

SEQ ID NO: 48292 - DNA, 50 bp, synthetic construct
  source 1..50: mol_type = other DNA
taacctccctatctccaataaaacctaaattacaacgaccaaaactcccg

SEQ ID NO: 48293 - DNA, 50 bp, synthetic construct
  source 1..50: mol_type = other DNA
caactccttcctatcaccccaaattcaaaaacaaaatctttatataaaca

SEQ ID NO: 48294 - DNA, 50 bp, synthetic construct
  source 1..50: mol_type = other DNA
cgactccttcctatcaccccaaattcgaaaacgaaatctttatataaacg

SEQ ID NO: 48295 - DNA, 50 bp, synthetic construct
  source 1..50: mol_type = other DNA
ttataaaagaaaatttggtgatattattgaaaaataaaaaggtgaatgat

SEQ ID NO: 48296 - DNA, 50 bp, synthetic construct
  source 1..50: mol_type = other DNA
ttataaaagaaaatttggtgatattattgaaaaataaaaaggtgaatgac

SEQ ID NO: 48297 - DNA, 50 bp, synthetic construct
  source 1..50: mol_type = other DNA
ttttctcacaaataaaataaaattaataatacctaccttacaaaaccaca

SEQ ID NO: 48298 - DNA, 50 bp, synthetic construct
  source 1..50: mol_type = other DNA
ttttctcacgaataaaataaaattaataatacctaccttacaaaaccacg

SEQ ID NO: 48299 - DNA, 50 bp, synthetic construct
  source 1..50: mol_type = other DNA
aatccaccctataacttctaactacaactctctaactattccaaaccaca

SEQ ID NO: 48300 - DNA, 50 bp, synthetic construct
  source 1..50: mol_type = other DNA
aatccaccctataacttctaactacaactctctaactattccaaaccgcg

SEQ ID NO: 48301 - DNA, 50 bp, synthetic construct
  source 1..50: mol_type = other DNA
attccaacactaaaaaaaatataactctcccttccaaacaaccaaaacca

SEQ ID NO: 48302 - DNA, 50 bp, synthetic construct
  source 1..50: mol_type = other DNA
attccaacgctaaaaaaaatataactctcccttccaaacaaccgaaaccg

SEQ ID NO: 48303 - DNA, 50 bp, synthetic construct
  source 1..50: mol_type = other DNA
tctaaaaacaattctataacctaaacacacctaaaaaaacacaacaaaca

SEQ ID NO: 48304 - DNA, 50 bp, synthetic construct
  source 1..50: mol_type = other DNA
tctaaaaacaattctataacctaaacgcgcctaaaaaaacgcaacgaacg

SEQ ID NO: 48305 - DNA, 50 bp, synthetic construct
  source 1..50: mol_type = other DNA
attaaactataaccatcttattttacttaccccacaaacctacacatcca

SEQ ID NO: 48306 - DNA, 50 bp, synthetic construct
  source 1..50: mol_type = other DNA
attaaactataaccgtcttattttacttaccccacaaacctacacgtccg

SEQ ID NO: 48307 - DNA, 50 bp, synthetic construct
  source 1..50: mol_type = other DNA
aatataaaatacatacatattaaactttaaattcttacctttcaaaaaca

SEQ ID NO: 48308 - DNA, 50 bp, synthetic construct
  source 1..50: mol_type = other DNA
aatataaaatacatacgtattaaactttaaattcttacctttcaaaaacg

SEQ ID NO: 48309 - DNA, 50 bp, synthetic construct
  source 1..50: mol_type = other DNA
taccaaaaaaacatataaacccaaaatctcaaaccacaatactaaatcca

SEQ ID NO: 48310 - DNA, 50 bp, synthetic construct
  source 1..50: mol_type = other DNA
taccaaaaaaacgtataaacccaaaatctcaaaccgcgatactaaatccg

SEQ ID NO: 48311 - DNA, 50 bp, synthetic construct
  source 1..50: mol_type = other DNA
ataaaatcattctaaaattaaaaaaaatacctcaacctcacccaaaccca

SEQ ID NO: 48312 - DNA, 50 bp, synthetic construct
  source 1..50: mol_type = other DNA
ataaaatcgttctaaaattaaaaaaaatacctcaacctcgcccaaacccg

SEQ ID NO: 48313 - DNA, 50 bp, synthetic construct
  source 1..50: mol_type = other DNA
aaaacaataaaaactaataccatcaccaccctataataaaaccccaccca

SEQ ID NO: 48314 - DNA, 50 bp, synthetic construct
  source 1..50: mol_type = other DNA
aaaacaataaaaactaataccatcaccgccctataataaaaccccgcccg

SEQ ID NO: 48315 - DNA, 50 bp, synthetic construct
  source 1..50: mol_type = other DNA
tttactccaactcaaaaaactaaacaaaaaacaaaccatccataaacaca

SEQ ID NO: 48316 - DNA, 50 bp, synthetic construct
  source 1..50: mol_type = other DNA
tttactccgactcaaaaaactaaacgaaaaacaaaccatccgtaaacacg

SEQ ID NO: 48317 - DNA, 50 bp, synthetic construct
  source 1..50: mol_type = other DNA
ccacataaaccatctcaccacctacaaatatccctctaatcaaaaaacca

SEQ ID NO: 48318 - DNA, 50 bp, synthetic construct
  source 1..50: mol_type = other DNA
ccacataaaccatctcgccacctacaaatatccctctaatcaaaaaaccg

SEQ ID NO: 48319 - DNA, 50 bp, synthetic construct
  source 1..50: mol_type = other DNA
aacaaaacaaactcaaaaaactaaaactcctcaaataataaaatacaaca

SEQ ID NO: 48320 - DNA, 50 bp, synthetic construct
  source 1..50: mol_type = other DNA
aacgaaacgaactcgaaaaactaaaactcctcaaataataaaatacaacg

SEQ ID NO: 48321 - DNA, 50 bp, synthetic construct
  source 1..50: mol_type = other DNA
actcctcaaataataaaatacaacaaccaacaaataacatcacaacaaca

SEQ ID NO: 48322 - DNA, 50 bp, synthetic construct
  source 1..50: mol_type = other DNA
actcctcaaataataaaatacaacgaccgacaaataacgtcacaacgacg

SEQ ID NO: 48323 - DNA, 50 bp, synthetic construct
  source 1..50: mol_type = other DNA
ctacaaacatctaataaccctactaaacaactccctaatcatcatcctca

SEQ ID NO: 48324 - DNA, 50 bp, synthetic construct
  source 1..50: mol_type = other DNA
ctacaaacatctaataaccctactaaacaactccctaatcgtcgtcctcg

SEQ ID NO: 48325 - DNA, 50 bp, synthetic construct
  source 1..50: mol_type = other DNA
atctttacctaaatacttcctaaaacaacacaaaccctcctctaacccca

SEQ ID NO: 48326 - DNA, 50 bp, synthetic construct
  source 1..50: mol_type = other DNA
atctttacctaaatacttcctaaaacaacacgaaccctcctctaaccccg

SEQ ID NO: 48327 - DNA, 50 bp, synthetic construct
  source 1..50: mol_type = other DNA
ctcccctatatcaaaaacaactcttaaaatccatcctaaaaaactcacca

SEQ ID NO: 48328 - DNA, 50 bp, synthetic construct
  source 1..50: mol_type = other DNA
ctcccctatatcgaaaacgactcttaaaatccatcctaaaaaactcaccg

SEQ ID NO: 48329 - DNA, 50 bp, synthetic construct
  source 1..50: mol_type = other DNA
cattaccctaacaataaatttcccaaaataaattctaaaaaccaccctca

SEQ ID NO: 48330 - DNA, 50 bp, synthetic construct
  source 1..50: mol_type = other DNA
cgttaccctaacgataaatttcccaaaataaattctaaaaaccgccctcg

SEQ ID NO: 48331 - DNA, 50 bp, synthetic construct
  source 1..50: mol_type = other DNA
acaaaaaaactaacaaaacaaacatctaaaaaacatctaaaaaaccaaca

SEQ ID NO: 48332 - DNA, 50 bp, synthetic construct
  source 1..50: mol_type = other DNA
acgaaaaaactaacgaaacgaacgtctaaaaaacgtctaaaaaaccaacg

SEQ ID NO: 48333 - DNA, 50 bp, synthetic construct
  source 1..50: mol_type = other DNA
acatctctaatctccaaaatctcattaatctttcaaacatctcccaaaca

SEQ ID NO: 48334 - DNA, 50 bp, synthetic construct
  source 1..50: mol_type = other DNA
gcgtctctaatctccaaaatctcgttaatctttcaaacgtctcccaaacg

SEQ ID NO: 48335 - DNA, 50 bp, synthetic construct
  source 1..50: mol_type = other DNA
ctctaatctccaaaatctcattaatctttcaaacatctcccaaacattca

SEQ ID NO: 48336 - DNA, 50 bp, synthetic construct
  source 1..50: mol_type = other DNA
ctctaatctccaaaatctcgttaatctttcaaacgtctcccaaacgttcg

SEQ ID NO: 48337 - DNA, 50 bp, synthetic construct
  source 1..50: mol_type = other DNA
ataattatcctaaccaatactaaaacaacaaaataacaaaacaacaaaca

SEQ ID NO: 48338 - DNA, 50 bp, synthetic construct
  source 1..50: mol_type = other DNA
ataattatcctaaccgatactaaaacgacgaaataacgaaacgacgaacg

SEQ ID NO: 48339 - DNA, 50 bp, synthetic construct
  source 1..50: mol_type = other DNA
aactactataattatcctaaccaatactaaaacaacaaaataacaaaaca

SEQ ID NO: 48340 - DNA, 50 bp, synthetic construct
  source 1..50: mol_type = other DNA
gactactataattatcctaaccgatactaaaacgacgaaataacgaaacg

SEQ ID NO: 48341 - DNA, 50 bp, synthetic construct
  source 1..50: mol_type = other DNA
taaacaccaaaactacaactactataattatcctaaccaatactaaaaca

SEQ ID NO: 48342 - DNA, 50 bp, synthetic construct
  source 1..50: mol_type = other DNA
taaacgccgaaactacgactactataattatcctaaccgatactaaaacg

SEQ ID NO: 48343 - DNA, 50 bp, synthetic construct
  source 1..50: mol_type = other DNA
ccaaaatctcaaaaaaacaattcccaacctcacataacacaacaatcaca

SEQ ID NO: 48344 - DNA, 50 bp, synthetic construct
  source 1..50: mol_type = other DNA
ccaaaatctcaaaaaaacgattcccaacctcacgtaacacaacgatcacg

SEQ ID NO: 48345 - DNA, 50 bp, synthetic construct
  source 1..50: mol_type = other DNA
cacataacacaacaatcacataacataaccccaaaaaaccaaaataaaca

SEQ ID NO: 48346 - DNA, 50 bp, synthetic construct
  source 1..50: mol_type = other DNA
cacgtaacacaacgatcacgtaacataaccccgaaaaaccgaaataaacg

SEQ ID NO: 48347 - DNA, 50 bp, synthetic construct
  source 1..50: mol_type = other DNA
ttaaaaaacaaaacaacataatcacatcaaactaaaaactaaatacacca

SEQ ID NO: 48348 - DNA, 50 bp, synthetic construct
  source 1..50: mol_type = other DNA
ttaaaaaacgaaacaacataatcacgtcgaactaaaaactaaatacgccg

SEQ ID NO: 48349 - DNA, 50 bp, synthetic construct
  source 1..50: mol_type = other DNA
acccattacccactaactaacatctttccctaaatataattaattactca

SEQ ID NO: 48350 - DNA, 50 bp, synthetic construct
  source 1..50: mol_type = other DNA
acccgttacccgctaactaacgtctttccctaaatataattaattactcg

SEQ ID NO: 48351 - DNA, 50 bp, synthetic construct
  source 1..50: mol_type = other DNA
acctaaatctcaaataactaaccatatccaaaaaaaaacaccaactaaca

SEQ ID NO: 48352 - DNA, 50 bp, synthetic construct
  source 1..50: mol_type = other DNA
acctaaatctcgaataactaaccatatccaaaaaaaaacgccaactaacg

SEQ ID NO: 48353 - DNA, 50 bp, synthetic construct
  source 1..50: mol_type = other DNA
ctccaaaacaaaaacaaaactaaaatacaacaaatcaaaaattaaaaaca

SEQ ID NO: 48354 - DNA, 50 bp, synthetic construct
  source 1..50: mol_type = other DNA
ctccgaaacaaaaacgaaactaaaatacgacaaatcgaaaattaaaaacg

SEQ ID NO: 48355 - DNA, 50 bp, synthetic construct
  source 1..50: mol_type = other DNA
aataaacaaaacactccaaaacaaaaacaaaactaaaatacaacaaatca

SEQ ID NO: 48356 - DNA, 50 bp, synthetic construct
  source 1..50: mol_type = other DNA
aataaacaaaacgctccgaaacaaaaacgaaactaaaatacgacaaatcg

SEQ ID NO: 48357 - DNA, 50 bp, synthetic construct
  source 1..50: mol_type = other DNA
ccaaaacaaaaataaaacacttatttcctaaatccaaactaaaaatctca

SEQ ID NO: 48358 - DNA, 50 bp, synthetic construct
  source 1..50: mol_type = other DNA
ccgaaacgaaaataaaacacttatttcctaaatccgaactaaaaatctcg

SEQ ID NO: 48359 - DNA, 50 bp, synthetic construct
  source 1..50: mol_type = other DNA
aatatccacttacctcctataacaaaaactaacaaatactacaacaccca

SEQ ID NO: 48360 - DNA, 50 bp, synthetic construct
  source 1..50: mol_type = other DNA
aatatccacttacctcctataacgaaaactaacaaatactacaacgcccg

SEQ ID NO: 48361 - DNA, 50 bp, synthetic construct
  source 1..50: mol_type = other DNA
ccaccattaactaccaaacaacccaaaacactaataatattaatcaccca

SEQ ID NO: 48362 - DNA, 50 bp, synthetic construct
  source 1..50: mol_type = other DNA
ccaccattaactaccaaacgacccaaaacgctaataatattaatcacccg

SEQ ID NO: 48363 - DNA, 50 bp, synthetic construct
  source 1..50: mol_type = other DNA
ctataataaccaaacttatctccaactcccaacctcaaacaatacttcca

SEQ ID NO: 48364 - DNA, 50 bp, synthetic construct
  source 1..50: mol_type = other DNA
ctataataaccaaacttatctccaactcccgacctcaaacgatacttccg

SEQ ID NO: 48365 - DNA, 50 bp, synthetic construct
  source 1..50: mol_type = other DNA
ccacaataaaaactcatatcccaaaataaactacatcccacctaaaatca

SEQ ID NO: 48366 - DNA, 50 bp, synthetic construct
  source 1..50: mol_type = other DNA
ccacgataaaaactcgtatcccaaaataaactacatcccgcctaaaatcg

SEQ ID NO: 48367 - DNA, 50 bp, synthetic construct
  source 1..50: mol_type = other DNA
aaactaaatataataactcacacctataatctcaacacttttaaaaacca

SEQ ID NO: 48368 - DNA, 50 bp, synthetic construct
  source 1..50: mol_type = other DNA
aaactaaatataataactcacgcctataatctcaacacttttaaaaaccg

SEQ ID NO: 48369 - DNA, 50 bp, synthetic construct
  source 1..50: mol_type = other DNA
taaataaaaaaaacctttataaatatccaaaaaccaactataccaaaaca

SEQ ID NO: 48370 - DNA, 50 bp, synthetic construct
  source 1..50: mol_type = other DNA
taaataaaaaaaacctttataaatatccaaaaaccgactataccaaaacg

SEQ ID NO: 48371 - DNA, 50 bp, synthetic construct
  source 1..50: mol_type = other DNA
aactattatcttataatcacaataaattaaaaacaaaaccaacataaaca

SEQ ID NO: 48372 - DNA, 50 bp, synthetic construct
  source 1..50: mol_type = other DNA
aactattatcttataatcacgataaattaaaaacgaaaccaacataaacg

SEQ ID NO: 48373 - DNA, 50 bp, synthetic construct
  source 1..50: mol_type = other DNA
ccttttacataaataacaaaaaatcctaaaaaacacaccaacaaaataca

SEQ ID NO: 48374 - DNA, 50 bp, synthetic construct
  source 1..50: mol_type = other DNA
ccttttacgtaaataacgaaaaatcctaaaaaacgcgccgacaaaatacg

SEQ ID NO: 48375 - DNA, 50 bp, synthetic construct
  source 1..50: mol_type = other DNA
ctcctactaaccttttacataaataacaaaaaatcctaaaaaacacacca

SEQ ID NO: 48376 - DNA, 50 bp, synthetic construct
  source 1..50: mol_type = other DNA
ctcctactaaccttttacgtaaataacgaaaaatcctaaaaaacgcgccg

SEQ ID NO: 48377 - DNA, 50 bp, synthetic construct
  source 1..50: mol_type = other DNA
aaaaaacttcaaaacaaaattactccaaaacaactaaaaaacaccaaaca

SEQ ID NO: 48378 - DNA, 50 bp, synthetic construct
  source 1..50: mol_type = other DNA
aaaaaacttcgaaacaaaattactccaaaacgactaaaaaacgccgaacg

SEQ ID NO: 48379 - DNA, 50 bp, synthetic construct
  source 1..50: mol_type = other DNA
tcaaaacaaaattactccaaaacaactaaaaaacaccaaacaaatctcca

SEQ ID NO: 48380 - DNA, 50 bp, synthetic construct
  source 1..50: mol_type = other DNA
tcgaaacaaaattactccaaaacgactaaaaaacgccgaacgaatctccg

SEQ ID NO: 48381 - DNA, 50 bp, synthetic construct
  source 1..50: mol_type = other DNA
aaaacaaaacaaaacacaacctaaatcactctaattcaaaaaaacaaaca

SEQ ID NO: 48382 - DNA, 50 bp, synthetic construct
  source 1..50: mol_type = other DNA
aaaacgaaacgaaacgcaacctaaatcactctaattcaaaaaaacgaacg

SEQ ID NO: 48383 - DNA, 50 bp, synthetic construct
  source 1..50: mol_type = other DNA
actctaattcaaaaaaacaaacaaaataaataaaaattaccctctaaaca

SEQ ID NO: 48384 - DNA, 50 bp, synthetic construct
  source 1..50: mol_type = other DNA
actctaattcaaaaaaacgaacgaaataaataaaaattaccctctaaacg

SEQ ID NO: 48385 - DNA, 50 bp, synthetic construct
  source 1..50: mol_type = other DNA
ccccaaaaaacaaaacccaacacaaacatatcttaattaactaaataaca

SEQ ID NO: 48386 - DNA, 50 bp, synthetic construct
  source 1..50: mol_type = other DNA
ccccaaaaaacgaaacccgacgcgaacgtatcttaattaactaaataacg

SEQ ID NO: 48387 - DNA, 50 bp, synthetic construct
  source 1..50: mol_type = other DNA
tctaaaataaaacaaaaaaatccaaaaaatataaacctctcctaccttca

SEQ ID NO: 48388 - DNA, 50 bp, synthetic construct
  source 1..50: mol_type = other DNA
tctaaaataaaacgaaaaaatccaaaaaatataaacctctcctaccttcg

SEQ ID NO: 48389 - DNA, 50 bp, synthetic construct
  source 1..50: mol_type = other DNA
aatttccccatcttatcccaaaaaacaaaaccaaataaaaactaaaaaca

SEQ ID NO: 48390 - DNA, 50 bp, synthetic construct
  source 1..50: mol_type = other DNA
aatttccccgtcttatcccaaaaaacaaaaccaaataaaaactaaaaacg

SEQ ID NO: 48391 - DNA, 50 bp, synthetic construct
  source 1..50: mol_type = other DNA
cacaattaactacaaaaccaacaaaaaaaacaacactatcatccaaaaca

SEQ ID NO: 48392 - DNA, 50 bp, synthetic construct
  source 1..50: mol_type = other DNA
cgcgattaactacgaaaccaacaaaaaaaacaacgctatcatccgaaacg

SEQ ID NO: 48393 - DNA, 50 bp, synthetic construct
  source 1..50: mol_type = other DNA
aaaatctacaacttaatactctctaaacacaactcacaactatactacca

SEQ ID NO: 48394 - DNA, 50 bp, synthetic construct
  source 1..50: mol_type = other DNA
aaaatctacgacttaatactctctaaacgcaactcgcgactatactaccg

SEQ ID NO: 48395 - DNA, 50 bp, synthetic construct
  source 1..50: mol_type = other DNA
cacaatttactcaaaatctacaacttaatactctctaaacacaactcaca

SEQ ID NO: 48396 - DNA, 50 bp, synthetic construct
  source 1..50: mol_type = other DNA
cgcaatttactcaaaatctacgacttaatactctctaaacgcaactcgcg

SEQ ID NO: 48397 - DNA, 50 bp, synthetic construct
  source 1..50: mol_type = other DNA
accacaatttactcaaaatctacaacttaatactctctaaacacaactca

SEQ ID NO: 48398 - DNA, 50 bp, synthetic construct
  source 1..50: mol_type = other DNA
accgcaatttactcaaaatctacgacttaatactctctaaacgcaactcg

SEQ ID NO: 48399 - DNA, 50 bp, synthetic construct
  source 1..50: mol_type = other DNA
cacaaactacacctaaaaaacatcaaatcacaaatcttaaacaaactaca

SEQ ID NO: 48400 - DNA, 50 bp, synthetic construct
  source 1..50: mol_type = other DNA
cgcgaactacgcctaaaaaacatcaaatcgcaaatcttaaacaaactacg

SEQ ID NO: 48401 - DNA, 50 bp, synthetic construct
  source 1..50: mol_type = other DNA
tcacaaatcttaaacaaactacaactcaaaaaaacacccaacatcaacca

SEQ ID NO: 48402 - DNA, 50 bp, synthetic construct
  source 1..50: mol_type = other DNA
tcgcaaatcttaaacaaactacgactcaaaaaaacgcccaacatcaaccg

SEQ ID NO: 48403 - DNA, 50 bp, synthetic construct
  source 1..50: mol_type = other DNA
taataacataatactcatcctcctccaaaaaatcctcaaactacaacaca

SEQ ID NO: 48404 - DNA, 50 bp, synthetic construct
  source 1..50: mol_type = other DNA
taataacgtaatactcgtcctcctccaaaaaatcctcgaactacaacgcg

SEQ ID NO: 48405 - DNA, 50 bp, synthetic construct
  source 1..50: mol_type = other DNA
aataataacataatactcatcctcctccaaaaaatcctcaaactacaaca

SEQ ID NO: 48406 - DNA, 50 bp, synthetic construct
  source 1..50: mol_type = other DNA
gataataacgtaatactcgtcctcctccaaaaaatcctcgaactacaacg

SEQ ID NO: 48407 - DNA, 50 bp, synthetic construct
  source 1..50: mol_type = other DNA
taacaatctcaataataacataatactcatcctcctccaaaaaatcctca

SEQ ID NO: 48408 - DNA, 50 bp, synthetic construct
  source 1..50: mol_type = other DNA
taacgatctcgataataacgtaatactcgtcctcctccaaaaaatcctcg

SEQ ID NO: 48409 - DNA, 50 bp, synthetic construct
  source 1..50: mol_type = other DNA
accaaaaccatcattaacataacccaaaaaaataaataaactacaaaaca

SEQ ID NO: 48410 - DNA, 50 bp, synthetic construct
  source 1..50: mol_type = other DNA
accgaaaccgtcattaacataacccaaaaaaataaataaactacgaaacg

SEQ ID NO: 48411 - DNA, 50 bp, synthetic construct
  source 1..50: mol_type = other DNA
caaaaccatcattaacataacccaaaaaaataaataaactacaaaacaca

SEQ ID NO: 48412 - DNA, 50 bp, synthetic construct
  source 1..50: mol_type = other DNA
cgaaaccgtcattaacataacccaaaaaaataaataaactacgaaacgcg

SEQ ID NO: 48413 - DNA, 50 bp, synthetic construct
  source 1..50: mol_type = other DNA
tacaacccattaaacacattacaaacaaaacacaaaataaaaaattacca

SEQ ID NO: 48414 - DNA, 50 bp, synthetic construct
  source 1..50: mol_type = other DNA
tacaacccgttaaacacgttacgaacgaaacacgaaataaaaaattaccg

SEQ ID NO: 48415 - DNA, 50 bp, synthetic construct
  source 1..50: mol_type = other DNA
aaaacacacaattctctacaacccattaaacacattacaaacaaaacaca

SEQ ID NO: 48416 - DNA, 50 bp, synthetic construct
  source 1..50: mol_type = other DNA
aaaacacacaattctctacaacccgttaaacacgttacgaacgaaacacg

SEQ ID NO: 48417 - DNA, 50 bp, synthetic construct
  source 1..50: mol_type = other DNA
ttaaaaaaaaacacacaattctctacaacccattaaacacattacaaaca

SEQ ID NO: 48418 - DNA, 50 bp, synthetic construct
  source 1..50: mol_type = other DNA
ttaaaaaaaaacacacaattctctacaacccgttaaacacgttacgaacg

SEQ ID NO: 48419 - DNA, 50 bp, synthetic construct
  source 1..50: mol_type = other DNA
attcttaaaaaaaaacacacaattctctacaacccattaaacacattaca

SEQ ID NO: 48420 - DNA, 50 bp, synthetic construct
  source 1..50: mol_type = other DNA
attcttaaaaaaaaacacacaattctctacaacccgttaaacacgttacg

SEQ ID NO: 48421 - DNA, 50 bp, synthetic construct
  source 1..50: mol_type = other DNA
ataataactcacatctataatcctaacactttaaaaaacctaaacaaaca

SEQ ID NO: 48422 - DNA, 50 bp, synthetic construct
  source 1..50: mol_type = other DNA
gtaataactcacgtctataatcctaacactttaaaaaacctaaacgaacg

SEQ ID NO: 48423 - DNA, 50 bp, synthetic construct
  source 1..50: mol_type = other DNA
aataacaaccaaaacaataaaactccataaactaaaaataccataaatca

SEQ ID NO: 48424 - DNA, 50 bp, synthetic construct
  source 1..50: mol_type = other DNA
aataacgaccgaaacgataaaactccataaactaaaaataccgtaaatcg

SEQ ID NO: 48425 - DNA, 50 bp, synthetic construct
  source 1..50: mol_type = other DNA
aaaaaaaaaacattacttcctaaaaacttcaaatataataaccaacacca

SEQ ID NO: 48426 - DNA, 50 bp, synthetic construct
  source 1..50: mol_type = other DNA
aaaaaaaaaacgttacttcctaaaaacttcaaatataataaccgacgccg

SEQ ID NO: 48427 - DNA, 50 bp, synthetic construct
  source 1..50: mol_type = other DNA
atcaaaaatctcaaaaaatatccctttcaccatataaaaaaaaacataca

SEQ ID NO: 48428 - DNA, 50 bp, synthetic construct
  source 1..50: mol_type = other DNA
atcaaaaatctcaaaaaatatccctttcaccgtataaaaaaaaacatacg

SEQ ID NO: 48429 - DNA, 50 bp, synthetic construct
  source 1..50: mol_type = other DNA
tcccctaatcaacatcaactaaatcaaaaacaaaatcaaacaaataaaca

SEQ ID NO: 48430 - DNA, 50 bp, synthetic construct
  source 1..50: mol_type = other DNA
tcccctaatcgacatcgactaaatcgaaaacgaaatcaaacaaataaacg

SEQ ID NO: 48431 - DNA, 50 bp, synthetic construct
  source 1..50: mol_type = other DNA
aaacataaaaatcccaaatcccctaatcaacatcaactaaatcaaaaaca

SEQ ID NO: 48432 - DNA, 50 bp, synthetic construct
  source 1..50: mol_type = other DNA
aaacgtaaaaatcccaaatcccctaatcgacatcgactaaatcgaaaacg

SEQ ID NO: 48433 - DNA, 50 bp, synthetic construct
  source 1..50: mol_type = other DNA
aaaaaaaatactcaaaaaaataaacataaaaatcccaaatcccctaatca

SEQ ID NO: 48434 - DNA, 50 bp, synthetic construct
  source 1..50: mol_type = other DNA
aaaaaaaatactcgaaaaaataaacgtaaaaatcccaaatcccctaatcg

SEQ ID NO: 48435 - DNA, 50 bp, synthetic construct
  source 1..50: mol_type = other DNA
aaacaacaacaccactttccaacaaaaaaaaatactcaaaaaaataaaca

SEQ ID NO: 48436 - DNA, 50 bp, synthetic construct
  source 1..50: mol_type = other DNA
aaacaacgacaccgctttccaacgaaaaaaaatactcgaaaaaataaacg

SEQ ID NO: 48437 - DNA, 50 bp, synthetic construct
  source 1..50: mol_type = other DNA
aatttttcacatatatccaacaaaaaaaaacccccatcccaaaaacaaca

SEQ ID NO: 48438 - DNA, 50 bp, synthetic construct
  source 1..50: mol_type = other DNA
aatttttcacgtatatccaacgaaaaaaaacccccatcccgaaaacaacg

SEQ ID NO: 48439 - DNA, 50 bp, synthetic construct
  source 1..50: mol_type = other DNA
acaaaaccaaaaaactcaaaaaaatcactaccctaatcccttccatacca

SEQ ID NO: 48440 - DNA, 50 bp, synthetic construct
  source 1..50: mol_type = other DNA
acaaaaccaaaaaactcaaaaaaatcactaccctaatcccttccgtaccg

SEQ ID NO: 48441 - DNA, 50 bp, synthetic construct
  source 1..50: mol_type = other DNA
aaaaactcaaaaaaatcactaccctaatcccttccataccaacaactaca

SEQ ID NO: 48442 - DNA, 50 bp, synthetic construct
  source 1..50: mol_type = other DNA
aaaaactcaaaaaaatcactaccctaatcccttccgtaccgacaactacg

SEQ ID NO: 48443 - DNA, 50 bp, synthetic construct
  source 1..50: mol_type = other DNA
aaaaaacaaatccaaatataaaaaacaactcaccaactaaatcaaacaca

SEQ ID NO: 48444 - DNA, 50 bp, synthetic construct
  source 1..50: mol_type = other DNA
gaaaaacgaatccaaatataaaaaacaactcgccaactaaatcaaacgcg

SEQ ID NO: 48445 - DNA, 50 bp, synthetic construct
  source 1..50: mol_type = other DNA
aaacaaaattctaaaccaaaccaaattacactcccaattcctaaacacca

SEQ ID NO: 48446 - DNA, 50 bp, synthetic construct
  source 1..50: mol_type = other DNA
gaacaaaattctaaaccgaaccaaattacgctcccaattcctaaacaccg

SEQ ID NO: 48447 - DNA, 50 bp, synthetic construct
  source 1..50: mol_type = other DNA
catctcatctacataccaaactatttaataaacatccacaaacaccccca

SEQ ID NO: 48448 - DNA, 50 bp, synthetic construct
  source 1..50: mol_type = other DNA
catctcatctacataccaaactatttaataaacgtccacaaacgcccccg

SEQ ID NO: 48449 - DNA, 50 bp, synthetic construct
  source 1..50: mol_type = other DNA
aaaaacaccaactaaaaattcataaataaaaaaactttcaaatcaaaaca

SEQ ID NO: 48450 - DNA, 50 bp, synthetic construct
  source 1..50: mol_type = other DNA
aaaaacgccaactaaaaattcataaataaaaaaactttcgaatcaaaacg

SEQ ID NO: 48451 - DNA, 50 bp, synthetic construct
  source 1..50: mol_type = other DNA
ttccaaaaaattaaaatattatctcctaaaaaaccaaataatcaaaatca

SEQ ID NO: 48452 - DNA, 50 bp, synthetic construct
  source 1..50: mol_type = other DNA
ttccaaaaaattaaaatattatctcctaaaaaaccgaataatcgaaatcg

SEQ ID NO: 48453 - DNA, 50 bp, synthetic construct
  source 1..50: mol_type = other DNA
aaataaataaatcacaaaatcacaaaataaaaaccatcctaactaacaca

SEQ ID NO: 48454 - DNA, 50 bp, synthetic construct
  source 1..50: mol_type = other DNA
aaataaataaatcacgaaatcacgaaataaaaaccatcctaactaacacg

SEQ ID NO: 48455 - DNA, 50 bp, synthetic construct
  source 1..50: mol_type = other DNA
catttccaacacatacaccttacatacacaacaaacacttcaacatctca

SEQ ID NO: 48456 - DNA, 50 bp, synthetic construct
  source 1..50: mol_type = other DNA
cgtttccaacacatacaccttacatacacaacaaacacttcaacatctcg

SEQ ID NO: 48457 - DNA, 50 bp, synthetic construct
  source 1..50: mol_type = other DNA
aacaactccctatattactaacaaaaccaacaataaatacaaaaaacaca

SEQ ID NO: 48458 - DNA, 50 bp, synthetic construct
  source 1..50: mol_type = other DNA
aacgactccctatattactaacgaaaccgacgataaatacgaaaaacgcg

SEQ ID NO: 48459 - DNA, 50 bp, synthetic construct
  source 1..50: mol_type = other DNA
ataacaactccctatattactaacaaaaccaacaataaatacaaaaaaca

SEQ ID NO: 48460 - DNA, 50 bp, synthetic construct
  source 1..50: mol_type = other DNA
ataacgactccctatattactaacgaaaccgacgataaatacgaaaaacg

SEQ ID NO: 48461 - DNA, 50 bp, synthetic construct
  source 1..50: mol_type = other DNA
aatttacattttcaaaataacaactccctatattactaacaaaaccaaca

SEQ ID NO: 48462 - DNA, 50 bp, synthetic construct
  source 1..50: mol_type = other DNA
aatttacgttttcaaaataacgactccctatattactaacgaaaccgacg

SEQ ID NO: 48463 - DNA, 50 bp, synthetic construct
  source 1..50: mol_type = other DNA
accaaaaataatttacattttcaaaataacaactccctatattactaaca

SEQ ID NO: 48464 - DNA, 50 bp, synthetic construct
  source 1..50: mol_type = other DNA
gccgaaaataatttacgttttcaaaataacgactccctatattactaacg

SEQ ID NO: 48465 - DNA, 50 bp, synthetic construct
  source 1..50: mol_type = other DNA
taccaacaacttccataaccaaaaaaacaacaaaccaaattaaacaaaca

SEQ ID NO: 48466 - DNA, 50 bp, synthetic construct
  source 1..50: mol_type = other DNA
taccgacaacttccataaccgaaaaaacaacgaaccaaattaaacgaacg

SEQ ID NO: 48467 - DNA, 50 bp, synthetic construct
  source 1..50: mol_type = other DNA
ttaaaaaatctaaacaaaaaacaactaaaaccctcatcacttcaccacca

SEQ ID NO: 48468 - DNA, 50 bp, synthetic construct
  source 1..50: mol_type = other DNA
ttaaaaaatctaaacgaaaaacaactaaaaccctcatcacttcgccgccg

SEQ ID NO: 48469 - DNA, 50 bp, synthetic construct
  source 1..50: mol_type = other DNA
accaataatccaatcccataatatcactccatttataatcctaccctaca

SEQ ID NO: 48470 - DNA, 50 bp, synthetic construct
  source 1..50: mol_type = other DNA
gccaataatccgatcccgtaatatcactccatttataatcctaccctacg

SEQ ID NO: 48471 - DNA, 50 bp, synthetic construct
  source 1..50: mol_type = other DNA
aacactaaacaacatatcccatttaaaaaacaaaacaaaacccaaacaca

SEQ ID NO: 48472 - DNA, 50 bp, synthetic construct
  source 1..50: mol_type = other DNA
aacactaaacaacatatcccatttaaaaaacaaaacaaaacccaaacgcg

SEQ ID NO: 48473 - DNA, 50 bp, synthetic construct
  source 1..50: mol_type = other DNA
actcaattatctacttaataaacctacctaaaacccaacccaaaacccca

SEQ ID NO: 48474 - DNA, 50 bp, synthetic construct
  source 1..50: mol_type = other DNA
actcaattatctacttaataaacctacctaaaacccaacccgaaaccccg

SEQ ID NO: 48475 - DNA, 50 bp, synthetic construct
  source 1..50: mol_type = other DNA
aactaaaataaaaaacaaacaactatatcatcaaaaacaaaacaacccca

SEQ ID NO: 48476 - DNA, 50 bp, synthetic construct
  source 1..50: mol_type = other DNA
aactaaaataaaaaacgaacaactatatcgtcaaaaacgaaacgaccccg

SEQ ID NO: 48477 - DNA, 50 bp, synthetic construct
  source 1..50: mol_type = other DNA
aaataaaaaacaaacaactatatcatcaaaaacaaaacaaccccactaca

SEQ ID NO: 48478 - DNA, 50 bp, synthetic construct
  source 1..50: mol_type = other DNA
aaataaaaaacgaacaactatatcgtcaaaaacgaaacgaccccgctacg

SEQ ID NO: 48479 - DNA, 50 bp, synthetic construct
  source 1..50: mol_type = other DNA
ctaaaactaaaacccaaactaaactaaaaaaaacaaaccaaacaaacaca

SEQ ID NO: 48480 - DNA, 50 bp, synthetic construct
  source 1..50: mol_type = other DNA
ctaaaactaaaacccgaactaaactaaaaaaaacgaaccaaacaaacgcg

SEQ ID NO: 48481 - DNA, 50 bp, synthetic construct
  source 1..50: mol_type = other DNA
cactaaaactaaaacccaaactaaactaaaaaaaacaaaccaaacaaaca

SEQ ID NO: 48482 - DNA, 50 bp, synthetic construct
  source 1..50: mol_type = other DNA
cgctaaaactaaaacccgaactaaactaaaaaaaacgaaccaaacaaacg

SEQ ID NO: 48483 - DNA, 50 bp, synthetic construct
  source 1..50: mol_type = other DNA
tcacaaaatctctaccttacttaaaaaaactcacaatcacaactaaaaca

SEQ ID NO: 48484 - DNA, 50 bp, synthetic construct
  source 1..50: mol_type = other DNA
tcgcgaaatctctaccttacttaaaaaaactcgcgatcgcaactaaaacg

SEQ ID NO: 48485 - DNA, 50 bp, synthetic construct
  source 1..50: mol_type = other DNA
cactaaaaaactcacaaaatctctaccttacttaaaaaaactcacaatca

SEQ ID NO: 48486 - DNA, 50 bp, synthetic construct
  source 1..50: mol_type = other DNA
cgctaaaaaactcgcgaaatctctaccttacttaaaaaaactcgcgatcg

SEQ ID NO: 48487 - DNA, 50 bp, synthetic construct
  source 1..50: mol_type = other DNA
aaaacactaaaaaactcacaaaatctctaccttacttaaaaaaactcaca

SEQ ID NO: 48488 - DNA, 50 bp, synthetic construct
  source 1..50: mol_type = other DNA
aaaacgctaaaaaactcgcgaaatctctaccttacttaaaaaaactcgcg

SEQ ID NO: 48489 - DNA, 50 bp, synthetic construct
  source 1..50: mol_type = other DNA
aaacaaaaccaaaactaaaaaccttaccaaaactaattctatatcacaca

SEQ ID NO: 48490 - DNA, 50 bp, synthetic construct
  source 1..50: mol_type = other DNA
aaacgaaaccgaaactaaaaaccttaccaaaactaattctatatcgcgcg

SEQ ID NO: 48491 - DNA, 50 bp, synthetic construct
  source 1..50: mol_type = other DNA
caaaactaaaaaccttaccaaaactaattctatatcacacatcaaaaaca

SEQ ID NO: 48492 - DNA, 50 bp, synthetic construct
  source 1..50: mol_type = other DNA
cgaaactaaaaaccttaccaaaactaattctatatcgcgcgtcaaaaacg

SEQ ID NO: 48493 - DNA, 50 bp, synthetic construct
  source 1..50: mol_type = other DNA
aaccttaccaaaactaattctatatcacacatcaaaaacactaaaaatca

SEQ ID NO: 48494 - DNA, 50 bp, synthetic construct
  source 1..50: mol_type = other DNA
aaccttaccaaaactaattctatatcgcgcgtcaaaaacgctaaaaatcg

SEQ ID NO: 48495 - DNA, 50 bp, synthetic construct
  source 1..50: mol_type = other DNA
atatcacacatcaaaaacactaaaaatcattacataacataaataactca

SEQ ID NO: 48496 - DNA, 50 bp, synthetic construct
  source 1..50: mol_type = other DNA
atatcgcgcgtcaaaaacgctaaaaatcgttacgtaacgtaaataactcg

SEQ ID NO: 48497 - DNA, 50 bp, synthetic construct
  source 1..50: mol_type = other DNA
aactcaaaaaataaataactaaacaaaactaaaatccctaaccaaaaaca

SEQ ID NO: 48498 - DNA, 50 bp, synthetic construct
  source 1..50: mol_type = other DNA
aactcgaaaaataaataactaaacgaaactaaaatccctaaccaaaaacg

SEQ ID NO: 48499 - DNA, 50 bp, synthetic construct
  source 1..50: mol_type = other DNA
aatccctaaccaaaaacaaaacaaaataaaatcataaccaaaaaaacaca

SEQ ID NO: 48500 - DNA, 50 bp, synthetic construct
  source 1..50: mol_type = other DNA
aatccctaaccaaaaacgaaacaaaataaaatcataaccaaaaaaacgcg

SEQ ID NO: 48501 - DNA, 50 bp, synthetic construct
  source 1..50: mol_type = other DNA
aatcttcaacaattccaacaattccaaccctctaaataactcttactaca

SEQ ID NO: 48502 - DNA, 50 bp, synthetic construct
  source 1..50: mol_type = other DNA
aatcttcgacaattccgacaattccgaccctctaaataactcttactacg

SEQ ID NO: 48503 - DNA, 50 bp, synthetic construct
  source 1..50: mol_type = other DNA
atcataaccaaaaaaacacactaacacaataaaaatcactcaaaaaacca

SEQ ID NO: 48504 - DNA, 50 bp, synthetic construct
  source 1..50: mol_type = other DNA
atcataaccaaaaaaacgcgctaacgcaataaaaatcactcaaaaaaccg

SEQ ID NO: 48505 - DNA, 50 bp, synthetic construct
  source 1..50: mol_type = other DNA
aaaaaaacacactaacacaataaaaatcactcaaaaaaccaaaactacca

SEQ ID NO: 48506 - DNA, 50 bp, synthetic construct
  source 1..50: mol_type = other DNA
aaaaaaacgcgctaacgcaataaaaatcactcaaaaaaccgaaactaccg

SEQ ID NO: 48507 - DNA, 50 bp, synthetic construct
  source 1..50: mol_type = other DNA
cactaacacaataaaaatcactcaaaaaaccaaaactaccaaaactacca

SEQ ID NO: 48508 - DNA, 50 bp, synthetic construct
  source 1..50: mol_type = other DNA
cgctaacgcaataaaaatcactcaaaaaaccgaaactaccgaaactaccg

SEQ ID NO: 48509 - DNA, 50 bp, synthetic construct
  source 1..50: mol_type = other DNA
caataaaaatcactcaaaaaaccaaaactaccaaaactaccaaaaaccca

SEQ ID NO: 48510 - DNA, 50 bp, synthetic construct
  source 1..50: mol_type = other DNA
caataaaaatcactcaaaaaaccgaaactaccgaaactaccgaaaacccg

SEQ ID NO: 48511 - DNA, 50 bp, synthetic construct
  source 1..50: mol_type = other DNA
caatcacatatataaatacaaaaaaactataaatccaaacactacaacca

SEQ ID NO: 48512 - DNA, 50 bp, synthetic construct
  source 1..50: mol_type = other DNA
caatcacatatataaatacgaaaaaactataaatccgaacgctacgaccg

SEQ ID NO: 48513 - DNA, 50 bp, synthetic construct
  source 1..50: mol_type = other DNA
ttaaaaacaaaaacaactatacctataaaaaaaatataaccaaaaaccca

SEQ ID NO: 48514 - DNA, 50 bp, synthetic construct
  source 1..50: mol_type = other DNA
ttaaaaacaaaaacaactatacctataaaaaaaatataaccgaaaacccg

SEQ ID NO: 48515 - DNA, 50 bp, synthetic construct
  source 1..50: mol_type = other DNA
accaaaaaaaaaacttatctaacccccaaaaaccaaacttacctaaaaca

SEQ ID NO: 48516 - DNA, 50 bp, synthetic construct
  source 1..50: mol_type = other DNA
accgaaaaaaaaacttatctaacccccaaaaaccaaacttacctaaaacg

SEQ ID NO: 48517 - DNA, 50 bp, synthetic construct
  source 1..50: mol_type = other DNA
ctctaacattaaccaataaaaaaacctaaaaacaaaaccaaaaaaacaca

SEQ ID NO: 48518 - DNA, 50 bp, synthetic construct
  source 1..50: mol_type = other DNA
ctctaacgttaaccaataaaaaaacctaaaaacgaaaccaaaaaaacgcg

SEQ ID NO: 48519 - DNA, 50 bp, synthetic construct
  source 1..50: mol_type = other DNA
atcaatttaaccaacttaaaacaatattaccacctcccaccaaattccca

SEQ ID NO: 48520 - DNA, 50 bp, synthetic construct
  source 1..50: mol_type = other DNA
atcaatttaaccaacttaaaacaatattaccgcctcccaccgaattcccg

SEQ ID NO: 48521 - DNA, 50 bp, synthetic construct
  source 1..50: mol_type = other DNA
tcactcttatcaatttaaccaacttaaaacaatattaccacctcccacca

SEQ ID NO: 48522 - DNA, 50 bp, synthetic construct
  source 1..50: mol_type = other DNA
tcgctcttatcaatttaaccaacttaaaacaatattaccgcctcccaccg

SEQ ID NO: 48523 - DNA, 50 bp, synthetic construct
  source 1..50: mol_type = other DNA
caacattatttcaaattaaccaaattaacaaaaacaaaaaatatactaca

SEQ ID NO: 48524 - DNA, 50 bp, synthetic construct
  source 1..50: mol_type = other DNA
caacattatttcaaattaaccaaattaacaaaaacgaaaaatatactacg

SEQ ID NO: 48525 - DNA, 50 bp, synthetic construct
  source 1..50: mol_type = other DNA
tcaaattaaccaaattaacaaaaacaaaaaatatactacattccatccca

SEQ ID NO: 48526 - DNA, 50 bp, synthetic construct
  source 1..50: mol_type = other DNA
tcaaattaaccaaattaacaaaaacgaaaaatatactacgttccatcccg

SEQ ID NO: 48527 - DNA, 50 bp, synthetic construct
  source 1..50: mol_type = other DNA
ttaatataaaaataattttaaaaaaaccttcctacacattaaatttacca

SEQ ID NO: 48528 - DNA, 50 bp, synthetic construct
  source 1..50: mol_type = other DNA
ttaatataaaaataattttaaaaaaaccttcctacacgttaaatttaccg

SEQ ID NO: 48529 - DNA, 50 bp, synthetic construct
  source 1..50: mol_type = other DNA
tctataacaaattcacaaacataaaaaaaaatacctcttctaaaaatcca

SEQ ID NO: 48530 - DNA, 50 bp, synthetic construct
  source 1..50: mol_type = other DNA
tctataacaaattcgcgaacgtaaaaaaaaatacctcttctaaaaatccg

SEQ ID NO: 48531 - DNA, 50 bp, synthetic construct
  source 1..50: mol_type = other DNA
aaaaatcacttaaacccaaaaattcaaaattacactaaaccaaaatcaca

SEQ ID NO: 48532 - DNA, 50 bp, synthetic construct
  source 1..50: mol_type = other DNA
aaaaatcgcttaaacccaaaaattcgaaattacactaaaccaaaatcgcg

SEQ ID NO: 48533 - DNA, 50 bp, synthetic construct
  source 1..50: mol_type = other DNA
aaaaaaatcacttaaacccaaaaattcaaaattacactaaaccaaaatca

SEQ ID NO: 48534 - DNA, 50 bp, synthetic construct
  source 1..50: mol_type = other DNA
gaaaaaatcgcttaaacccaaaaattcgaaattacactaaaccaaaatcg

SEQ ID NO: 48535 - DNA, 50 bp, synthetic construct
  source 1..50: mol_type = other DNA
aatcttaactcaatacaacctcaaactcctaaacttaaacaatcctccca

SEQ ID NO: 48536 - DNA, 50 bp, synthetic construct
  source 1..50: mol_type = other DNA
gatcttaactcaatacaacctcgaactcctaaacttaaacgatcctcccg

SEQ ID NO: 48537 - DNA, 50 bp, synthetic construct
  source 1..50: mol_type = other DNA
aaaaataataatcaccccttaataacacacacctataatcccaatactca

SEQ ID NO: 48538 - DNA, 50 bp, synthetic construct
  source 1..50: mol_type = other DNA
aaaaataataatcgccccttaataacacacgcctataatcccaatactcg

SEQ ID NO: 48539 - DNA, 50 bp, synthetic construct
  source 1..50: mol_type = other DNA
aaataaatctaccctaaatttaaaataaaaatcacaaccaaaaaaaacca

SEQ ID NO: 48540 - DNA, 50 bp, synthetic construct
  source 1..50: mol_type = other DNA
aaataaatctaccctaaatttaaaataaaaatcacaaccgaaaaaaaccg

SEQ ID NO: 48541 - DNA, 50 bp, synthetic construct
  source 1..50: mol_type = other DNA
cctaaatttaaaataaaaatcacaaccaaaaaaaaccaaactaaatccca

SEQ ID NO: 48542 - DNA, 50 bp, synthetic construct
  source 1..50: mol_type = other DNA
cctaaatttaaaataaaaatcacaaccgaaaaaaaccgaactaaatcccg

SEQ ID NO: 48543 - DNA, 50 bp, synthetic construct
  source 1..50: mol_type = other DNA
aaacaaaaaccaaaactaaacacaaaacttacaaaccaactaaaattcca

SEQ ID NO: 48544 - DNA, 50 bp, synthetic construct
  source 1..50: mol_type = other DNA
gaacgaaaaccgaaactaaacgcgaaacttacgaaccaactaaaattccg

SEQ ID NO: 48545 - DNA, 50 bp, synthetic construct
  source 1..50: mol_type = other DNA
aaaaaattaaccaaacttaacaacaaacacctataatccctactactcca

SEQ ID NO: 48546 - DNA, 50 bp, synthetic construct
  source 1..50: mol_type = other DNA
aaaaaattaaccgaacttaacgacgaacgcctataatccctactactccg

SEQ ID NO: 48547 - DNA, 50 bp, synthetic construct
  source 1..50: mol_type = other DNA
aattcacaccattctcctatctccaaaataacaaaaactacaaacaccca

SEQ ID NO: 48548 - DNA, 50 bp, synthetic construct
  source 1..50: mol_type = other DNA
aattcacgccattctcctatctccgaaataacaaaaactacaaacgcccg

SEQ ID NO: 48549 - DNA, 50 bp, synthetic construct
  source 1..50: mol_type = other DNA
ttgagatgggtagattatgatgttaggagattgaaattattttggttaat

SEQ ID NO: 48550 - DNA, 50 bp, synthetic construct
  source 1..50: mol_type = other DNA
ttgagacgggtagattacgatgttaggagatcgaaattattttggttaac

SEQ ID NO: 48551 - DNA, 50 bp, synthetic construct
  source 1..50: mol_type = other DNA
aaataaaatttcaccacattaaccaaaataatttcaatctcctaacatca

SEQ ID NO: 48552 - DNA, 50 bp, synthetic construct
  source 1..50: mol_type = other DNA
aaataaaatttcgccgcgttaaccaaaataatttcgatctcctaacatcg

SEQ ID NO: 48553 - DNA, 50 bp, synthetic construct
  source 1..50: mol_type = other DNA
aaaacaaatcaaaacaaaaaaccaaaaacaaacaaaaactaccaaacaca

SEQ ID NO: 48554 - DNA, 50 bp, synthetic construct
  source 1..50: mol_type = other DNA
aaaacaaatcaaaacaaaaaaccgaaaacaaacaaaaactaccaaacgcg

SEQ ID NO: 48555 - DNA, 50 bp, synthetic construct
  source 1..50: mol_type = other DNA
aaacaaaaaaccaaaaacaaacaaaaactaccaaacacaaaactcctcca

SEQ ID NO: 48556 - DNA, 50 bp, synthetic construct
  source 1..50: mol_type = other DNA
aaacaaaaaaccgaaaacaaacaaaaactaccaaacgcgaaactcctccg

SEQ ID NO: 48557 - DNA, 50 bp, synthetic construct
  source 1..50: mol_type = other DNA
actaaactactcttactaactacaaccataaacctctactcaccatacca

SEQ ID NO: 48558 - DNA, 50 bp, synthetic construct
  source 1..50: mol_type = other DNA
actaaactactcttactaactacaaccgtaaacctctactcaccgtaccg

SEQ ID NO: 48559 - DNA, 50 bp, synthetic construct
  source 1..50: mol_type = other DNA
ttacattatccttcccttaccaataaaaccctaaaatacaaacacaacca

SEQ ID NO: 48560 - DNA, 50 bp, synthetic construct
  source 1..50: mol_type = other DNA
ttacattatccttcccttaccgataaaaccctaaaatacgaacgcgaccg

SEQ ID NO: 48561 - DNA, 50 bp, synthetic construct
  source 1..50: mol_type = other DNA
aaacttacattatccttcccttaccaataaaaccctaaaatacaaacaca

SEQ ID NO: 48562 - DNA, 50 bp, synthetic construct
  source 1..50: mol_type = other DNA
aaacttacattatccttcccttaccgataaaaccctaaaatacgaacgcg

SEQ ID NO: 48563 - DNA, 50 bp, synthetic construct
  source 1..50: mol_type = other DNA
acaaaaaaatcttaaacctaaaaaacaaaatttccaataaaccaaaatca

SEQ ID NO: 48564 - DNA, 50 bp, synthetic construct
  source 1..50: mol_type = other DNA
acaaaaaaatcttaaacctaaaaaacgaaatttccaataaaccgaaatcg

SEQ ID NO: 48565 - DNA, 50 bp, synthetic construct
  source 1..50: mol_type = other DNA
aaaaaaactatcaaaaaaataaacccaaaacatcccccaataacacaaca

SEQ ID NO: 48566 - DNA, 50 bp, synthetic construct
  source 1..50: mol_type = other DNA
aaaaaaactatcaaaaaaataaacccaaaacgtcccccgataacgcaacg

SEQ ID NO: 48567 - DNA, 50 bp, synthetic construct
  source 1..50: mol_type = other DNA
aaaactatcaaaaaaataaacccaaaacatcccccaataacacaacacca

SEQ ID NO: 48568 - DNA, 50 bp, synthetic construct
  source 1..50: mol_type = other DNA
aaaactatcaaaaaaataaacccaaaacgtcccccgataacgcaacgccg

SEQ ID NO: 48569 - DNA, 50 bp, synthetic construct
  source 1..50: mol_type = other DNA
ataacaaatacaccttataatccaacatctaacaactttcacacctaaca

SEQ ID NO: 48570 - DNA, 50 bp, synthetic construct
  source 1..50: mol_type = other DNA
ataacgaatacgccttataatccaacgtctaacaactttcacgcctaacg

SEQ ID NO: 48571 - DNA, 50 bp, synthetic construct
  source 1..50: mol_type = other DNA
atataccaaaaaactacatcatccaaaattacttccaaatcaacacaaca

SEQ ID NO: 48572 - DNA, 50 bp, synthetic construct
  source 1..50: mol_type = other DNA
gtataccgaaaaactacatcgtccaaaattacttccgaatcgacgcgacg

SEQ ID NO: 48573 - DNA, 50 bp, synthetic construct
  source 1..50: mol_type = other DNA
atccctacacaaacaccaaaaaaatccttaaaaaacaaacttcaaaaaca

SEQ ID NO: 48574 - DNA, 50 bp, synthetic construct
  source 1..50: mol_type = other DNA
atccctacgcgaacaccgaaaaaatccttaaaaaacgaacttcaaaaacg

SEQ ID NO: 48575 - DNA, 50 bp, synthetic construct
  source 1..50: mol_type = other DNA
aatctcatactatataaaaaaaccctaccaaacaccatctcctctctcca

SEQ ID NO: 48576 - DNA, 50 bp, synthetic construct
  source 1..50: mol_type = other DNA
aatctcatactatataaaaaaaccctaccaaacaccgtctcctctctccg

SEQ ID NO: 48577 - DNA, 50 bp, synthetic construct
  source 1..50: mol_type = other DNA
caactaaaaaataaaccaaatatacatttcatttactctaaaaatcaaca

SEQ ID NO: 48578 - DNA, 50 bp, synthetic construct
  source 1..50: mol_type = other DNA
cgactaaaaaataaaccgaatatacatttcatttactctaaaaatcgacg

SEQ ID NO: 48579 - DNA, 50 bp, synthetic construct
  source 1..50: mol_type = other DNA
aataaaccaaatatacatttcatttactctaaaaatcaacaaaatttaca

SEQ ID NO: 48580 - DNA, 50 bp, synthetic construct
  source 1..50: mol_type = other DNA
aataaaccgaatatacatttcatttactctaaaaatcgacgaaatttacg

SEQ ID NO: 48581 - DNA, 50 bp, synthetic construct
  source 1..50: mol_type = other DNA
taatagtttttttattttgttgtagataaagaaaagaaggaataatggtt

SEQ ID NO: 48582 - DNA, 50 bp, synthetic construct
  source 1..50: mol_type = other DNA
taatagtttttttattttgtcgtagataaagaaaagaaggaataatggtc

SEQ ID NO: 48583 - DNA, 50 bp, synthetic construct
  source 1..50: mol_type = other DNA
tttgttgtagataaagaaaagaaggaataatggttgtgttaaaaagggtt

SEQ ID NO: 48584 - DNA, 50 bp, synthetic construct
  source 1..50: mol_type = other DNA
tttgtcgtagataaagaaaagaaggaataatggtcgtgttaaaaagggtc

SEQ ID NO: 48585 - DNA, 50 bp, synthetic construct
  source 1..50: mol_type = other DNA
tgttgtagataaagaaaagaaggaataatggttgtgttaaaaagggttgt

SEQ ID NO: 48586 - DNA, 50 bp, synthetic construct
  source 1..50: mol_type = other DNA
tgtcgtagataaagaaaagaaggaataatggtcgtgttaaaaagggtcgc

SEQ ID NO: 48587 - DNA, 50 bp, synthetic construct
  source 1..50: mol_type = other DNA
caaaaacatttctaaaacaaacatcttcaataataaataaatcaccaaca

SEQ ID NO: 48588 - DNA, 50 bp, synthetic construct
  source 1..50: mol_type = other DNA
caaaaacatttctaaaacgaacgtcttcgataataaataaatcaccgacg

SEQ ID NO: 48589 - DNA, 50 bp, synthetic construct
  source 1..50: mol_type = other DNA
aaaacatttctaaaacaaacatcttcaataataaataaatcaccaacaca

SEQ ID NO: 48590 - DNA, 50 bp, synthetic construct
  source 1..50: mol_type = other DNA
aaaacatttctaaaacgaacgtcttcgataataaataaatcaccgacgcg

SEQ ID NO: 48591 - DNA, 50 bp, synthetic construct
  source 1..50: mol_type = other DNA
aacaacattcttattactccaaacatcatccttacacaccaaactaaaca

SEQ ID NO: 48592 - DNA, 50 bp, synthetic construct
  source 1..50: mol_type = other DNA
aacgacgttcttattactccaaacatcatccttacacaccaaactaaacg

SEQ ID NO: 48593 - DNA, 50 bp, synthetic construct
  source 1..50: mol_type = other DNA
tccaaacaactaataaaaaaaattccaaaaatccacaccattcataaaca

SEQ ID NO: 48594 - DNA, 50 bp, synthetic construct
  source 1..50: mol_type = other DNA
tccgaacaactaataaaaaaaattccaaaaatccacgccattcgtaaacg

SEQ ID NO: 48595 - DNA, 50 bp, synthetic construct
  source 1..50: mol_type = other DNA
attccaaaaatccacaccattcataaacacaatctctaatatcctctcca

SEQ ID NO: 48596 - DNA, 50 bp, synthetic construct
  source 1..50: mol_type = other DNA
attccaaaaatccacgccattcgtaaacgcaatctctaatatcctctccg

SEQ ID NO: 48597 - DNA, 50 bp, synthetic construct
  source 1..50: mol_type = other DNA
caccttaatatatacccatctaaatccccaaaaaaacaacaaaaactaca

SEQ ID NO: 48598 - DNA, 50 bp, synthetic construct
  source 1..50: mol_type = other DNA
cgccttaatatatacccatctaaatccccaaaaaaacgacgaaaactacg

SEQ ID NO: 48599 - DNA, 50 bp, synthetic construct
  source 1..50: mol_type = other DNA
aaataaaaaacaaaaataatttccaacctaaaaacaaaccccaaaaccca

SEQ ID NO: 48600 - DNA, 50 bp, synthetic construct
  source 1..50: mol_type = other DNA
aaataaaaaacgaaaataatttccaacctaaaaacaaaccccgaaacccg

SEQ ID NO: 48601 - DNA, 50 bp, synthetic construct
  source 1..50: mol_type = other DNA
ccaaaaacccaaaccacaaaaaccacataaaattacactatctctaacca

SEQ ID NO: 48602 - DNA, 50 bp, synthetic construct
  source 1..50: mol_type = other DNA
ccaaaaacccgaaccacaaaaaccgcgtaaaattacactatctctaaccg

SEQ ID NO: 48603 - DNA, 50 bp, synthetic construct
  source 1..50: mol_type = other DNA
aaaacccctaaactaaaacatcaaaacaaaaaccacctaaaccactaaca

SEQ ID NO: 48604 - DNA, 50 bp, synthetic construct
  source 1..50: mol_type = other DNA
aaaacccctaaactaaaacatcgaaacaaaaaccacctaaaccgctaacg

SEQ ID NO: 48605 - DNA, 50 bp, synthetic construct
  source 1..50: mol_type = other DNA
aaaaaaaacccaaccaaatccaacccaaaaacccctaaactaaaacatca

SEQ ID NO: 48606 - DNA, 50 bp, synthetic construct
  source 1..50: mol_type = other DNA
aaaaaaaacccaaccaaatccgacccgaaaacccctaaactaaaacatcg

SEQ ID NO: 48607 - DNA, 50 bp, synthetic construct
  source 1..50: mol_type = other DNA
aaaccaaacttaactaaactcccttcaccctctacaaaatcataaaaaca

SEQ ID NO: 48608 - DNA, 50 bp, synthetic construct
  source 1..50: mol_type = other DNA
gaaccgaacttaactaaactcccttcaccctctacgaaatcataaaaacg

SEQ ID NO: 48609 - DNA, 50 bp, synthetic construct
  source 1..50: mol_type = other DNA
acttaactaaactcccttcaccctctacaaaatcataaaaacaaacaaca

SEQ ID NO: 48610 - DNA, 50 bp, synthetic construct
  source 1..50: mol_type = other DNA
acttaactaaactcccttcaccctctacgaaatcataaaaacgaacgacg

SEQ ID NO: 48611 - DNA, 50 bp, synthetic construct
  source 1..50: mol_type = other DNA
aaaacaaacaacactctacaaatactaaacttacttttcaacctaaccca

SEQ ID NO: 48612 - DNA, 50 bp, synthetic construct
  source 1..50: mol_type = other DNA
aaaacgaacgacgctctacaaatactaaacttacttttcaacctaacccg

SEQ ID NO: 48613 - DNA, 50 bp, synthetic construct
  source 1..50: mol_type = other DNA
ctccaaaataaacaactctcaaacaaataaataacacaaaaacaccaaca

SEQ ID NO: 48614 - DNA, 50 bp, synthetic construct
  source 1..50: mol_type = other DNA
ctccgaaataaacaactctcaaacaaataaataacgcgaaaacaccgacg

SEQ ID NO: 48615 - DNA, 50 bp, synthetic construct
  source 1..50: mol_type = other DNA
aataaacaactctcaaacaaataaataacacaaaaacaccaacaaactca

SEQ ID NO: 48616 - DNA, 50 bp, synthetic construct
  source 1..50: mol_type = other DNA
aataaacaactctcaaacaaataaataacgcgaaaacaccgacgaactcg

SEQ ID NO: 48617 - DNA, 50 bp, synthetic construct
  source 1..50: mol_type = other DNA
aaacccaatacacacaacctcaaaaaatataaacacaatctcaaacaaca

SEQ ID NO: 48618 - DNA, 50 bp, synthetic construct
  source 1..50: mol_type = other DNA
aaacccaatacgcgcaacctcgaaaaatataaacacgatctcaaacgacg

SEQ ID NO: 48619 - DNA, 50 bp, synthetic construct
  source 1..50: mol_type = other DNA
aaattataaatactacccccaatttaccaaaaccacctaaaaaaaaaaca

SEQ ID NO: 48620 - DNA, 50 bp, synthetic construct
  source 1..50: mol_type = other DNA
aaattataaatactacccccgatttaccaaaaccacctaaaaaaaaaacg

SEQ ID NO: 48621 - DNA, 50 bp, synthetic construct
  source 1..50: mol_type = other DNA
aaaatcaacaacactctaaaaaaaaataacataaaaatcccaaaatacca

SEQ ID NO: 48622 - DNA, 50 bp, synthetic construct
  source 1..50: mol_type = other DNA
aaaatcgacgacgctctaaaaaaaaataacgtaaaaatcccgaaataccg

SEQ ID NO: 48623 - DNA, 50 bp, synthetic construct
  source 1..50: mol_type = other DNA
tccaccctatcaacaaaacaacaaaactaaaaataactaaaatcaacaca

SEQ ID NO: 48624 - DNA, 50 bp, synthetic construct
  source 1..50: mol_type = other DNA
tccgccctatcgacaaaacaacgaaactaaaaataactaaaatcgacgcg

SEQ ID NO: 48625 - DNA, 50 bp, synthetic construct
  source 1..50: mol_type = other DNA
ataactccaccctatcaacaaaacaacaaaactaaaaataactaaaatca

SEQ ID NO: 48626 - DNA, 50 bp, synthetic construct
  source 1..50: mol_type = other DNA
ataactccgccctatcgacaaaacaacgaaactaaaaataactaaaatcg

SEQ ID NO: 48627 - DNA, 50 bp, synthetic construct
  source 1..50: mol_type = other DNA
tctctattactaactctcactcaacattctcaataaaaataatttttcca

SEQ ID NO: 48628 - DNA, 50 bp, synthetic construct
  source 1..50: mol_type = other DNA
tctctattactaactctcgctcaacgttctcgataaaaataatttttccg

SEQ ID NO: 48629 - DNA, 50 bp, synthetic construct
  source 1..50: mol_type = other DNA
actctcactcaacattctcaataaaaataatttttccaaaaaaaaccaca

SEQ ID NO: 48630 - DNA, 50 bp, synthetic construct
  source 1..50: mol_type = other DNA
actctcgctcaacgttctcgataaaaataatttttccgaaaaaaaccacg

SEQ ID NO: 48631 - DNA, 50 bp, synthetic construct
  source 1..50: mol_type = other DNA
catacaaaacccttaaaaaacaaaaccccaaaacctaacttaaaaacaca

SEQ ID NO: 48632 - DNA, 50 bp, synthetic construct
  source 1..50: mol_type = other DNA
cgtacgaaacccttaaaaaacaaaaccccaaaacctaacttaaaaacgcg

SEQ ID NO: 48633 - DNA, 50 bp, synthetic construct
  source 1..50: mol_type = other DNA
cccaaaacctaacttaaaaacacaaaaaacaaactaaaaattataattca

SEQ ID NO: 48634 - DNA, 50 bp, synthetic construct
  source 1..50: mol_type = other DNA
cccaaaacctaacttaaaaacgcgaaaaacaaactaaaaattataattcg

SEQ ID NO: 48635 - DNA, 50 bp, synthetic construct
  source 1..50: mol_type = other DNA
aacttaaaaacacaaaaaacaaactaaaaattataattcaaaaaccctca

SEQ ID NO: 48636 - DNA, 50 bp, synthetic construct
  source 1..50: mol_type = other DNA
aacttaaaaacgcgaaaaacaaactaaaaattataattcgaaaaccctcg

SEQ ID NO: 48637 - DNA, 50 bp, synthetic construct
  source 1..50: mol_type = other DNA
caactaaaatctaacaaccaaaaaaactaattatcccaacataccctaca

SEQ ID NO: 48638 - DNA, 50 bp, synthetic construct
  source 1..50: mol_type = other DNA
cgactaaaatctaacgaccgaaaaaactaattatcccaacgtaccctacg

SEQ ID NO: 48639 - DNA, 50 bp, synthetic construct
  source 1..50: mol_type = other DNA
taatcacaaccaaatcctcaacaataatttactcctattactcatcctca

SEQ ID NO: 48640 - DNA, 50 bp, synthetic construct
  source 1..50: mol_type = other DNA
taatcacgaccaaatcctcaacgataatttactcctattactcgtcctcg

SEQ ID NO: 48641 - DNA, 50 bp, synthetic construct
  source 1..50: mol_type = other DNA
atcaaacaaaaacaaacaacaaaaacaaactatcactaaaaacctaatca

SEQ ID NO: 48642 - DNA, 50 bp, synthetic construct
  source 1..50: mol_type = other DNA
atcgaacgaaaacgaacaacaaaaacaaactatcgctaaaaacctaatcg

SEQ ID NO: 48643 - DNA, 50 bp, synthetic construct
  source 1..50: mol_type = other DNA
acaaactatcactaaaaacctaatcataaccaaatataaaataaaaaaca

SEQ ID NO: 48644 - DNA, 50 bp, synthetic construct
  source 1..50: mol_type = other DNA
acaaactatcgctaaaaacctaatcgtaaccaaatataaaataaaaaacg

SEQ ID NO: 48645 - DNA, 50 bp, synthetic construct
  source 1..50: mol_type = other DNA
tatcactaaaaacctaatcataaccaaatataaaataaaaaacaacatca

SEQ ID NO: 48646 - DNA, 50 bp, synthetic construct
  source 1..50: mol_type = other DNA
tatcgctaaaaacctaatcgtaaccaaatataaaataaaaaacgacatcg

SEQ ID NO: 48647 - DNA, 50 bp, synthetic construct
  source 1..50: mol_type = other DNA
aatcataaccaaatataaaataaaaaacaacatcaccaacaataaataca

SEQ ID NO: 48648 - DNA, 50 bp, synthetic construct
  source 1..50: mol_type = other DNA
aatcgtaaccaaatataaaataaaaaacgacatcgccaacaataaatacg

SEQ ID NO: 48649 - DNA, 50 bp, synthetic construct
  source 1..50: mol_type = other DNA
aaccaaatataaaataaaaaacaacatcaccaacaataaatacaacctca

SEQ ID NO: 48650 - DNA, 50 bp, synthetic construct
  source 1..50: mol_type = other DNA
aaccaaatataaaataaaaaacgacatcgccaacaataaatacgacctcg

SEQ ID NO: 48651 - DNA, 50 bp, synthetic construct
  source 1..50: mol_type = other DNA
tataaaataaaaaacaacatcaccaacaataaatacaacctcaaaaatca

SEQ ID NO: 48652 - DNA, 50 bp, synthetic construct
  source 1..50: mol_type = other DNA
tataaaataaaaaacgacatcgccaacaataaatacgacctcgaaaatcg

SEQ ID NO: 48653 - DNA, 50 bp, synthetic construct
  source 1..50: mol_type = other DNA
aaacaaaaaaatcatacaaactaaactactaaaaaacccacaccaatcca

SEQ ID NO: 48654 - DNA, 50 bp, synthetic construct
  source 1..50: mol_type = other DNA
aaacgaaaaaatcatacgaactaaactactaaaaaacccgcaccgatccg

SEQ ID NO: 48655 - DNA, 50 bp, synthetic construct
  source 1..50: mol_type = other DNA
aacctaaacaaacaaacccaaactaaaatctataaaaatacaaatcaaca

SEQ ID NO: 48656 - DNA, 50 bp, synthetic construct
  source 1..50: mol_type = other DNA
aacctaaacgaacaaacccaaactaaaatctataaaaatacgaatcgacg

SEQ ID NO: 48657 - DNA, 50 bp, synthetic construct
  source 1..50: mol_type = other DNA
aaacccaaactaaaatctataaaaatacaaatcaacaaccaaaataaaca

SEQ ID NO: 48658 - DNA, 50 bp, synthetic construct
  source 1..50: mol_type = other DNA
aaacccaaactaaaatctataaaaatacgaatcgacgaccaaaataaacg

SEQ ID NO: 48659 - DNA, 50 bp, synthetic construct
  source 1..50: mol_type = other DNA
aaaaaccctaacaaactccaacccaaaaccatttattaaaaaacaaaaca

SEQ ID NO: 48660 - DNA, 50 bp, synthetic construct
  source 1..50: mol_type = other DNA
aaaaaccctaacaaactccgacccgaaaccgtttattaaaaaacaaaacg

SEQ ID NO: 48661 - DNA, 50 bp, synthetic construct
  source 1..50: mol_type = other DNA
aaaaataacaacacccaacactccattaaataaccataaacaaaacttca

SEQ ID NO: 48662 - DNA, 50 bp, synthetic construct
  source 1..50: mol_type = other DNA
gaaaataacgacacccgacgctccattaaataaccgtaaacgaaacttcg

SEQ ID NO: 48663 - DNA, 50 bp, synthetic construct
  source 1..50: mol_type = other DNA
ccaacacaaaaaccaaaaaacactcacccaaaaaaataacactaaaacca

SEQ ID NO: 48664 - DNA, 50 bp, synthetic construct
  source 1..50: mol_type = other DNA
ccaacgcaaaaaccaaaaaacactcacccaaaaaaataacgctaaaaccg

SEQ ID NO: 48665 - DNA, 50 bp, synthetic construct
  source 1..50: mol_type = other DNA
aacaccatttttttaaataaatattttttaattcctacattaaaattcca

SEQ ID NO: 48666 - DNA, 50 bp, synthetic construct
  source 1..50: mol_type = other DNA
aacgccatttttttaaataaatattttttaattcctacgttaaaattccg

SEQ ID NO: 48667 - DNA, 50 bp, synthetic construct
  source 1..50: mol_type = other DNA
tcattctctattctattaaatcctaactccaaaaaaaaaacactcaaaca

SEQ ID NO: 48668 - DNA, 50 bp, synthetic construct
  source 1..50: mol_type = other DNA
tcgttctctattctattaaatcctaactccaaaaaaaaaacactcaaacg

SEQ ID NO: 48669 - DNA, 50 bp, synthetic construct
  source 1..50: mol_type = other DNA
aacattaacccctaataacccacaaaacctaaaacctacctccaaaaaca

SEQ ID NO: 48670 - DNA, 50 bp, synthetic construct
  source 1..50: mol_type = other DNA
aacattaacccctaataacccgcgaaacctaaaacctacctccaaaaacg

SEQ ID NO: 48671 - DNA, 50 bp, synthetic construct
  source 1..50: mol_type = other DNA
aacaaccctcctaaaaaaaaacaataccaacattaacccctaataaccca

SEQ ID NO: 48672 - DNA, 50 bp, synthetic construct
  source 1..50: mol_type = other DNA
aacaaccctcctaaaaaaaaacgataccaacattaacccctaataacccg

SEQ ID NO: 48673 - DNA, 50 bp, synthetic construct
  source 1..50: mol_type = other DNA
aaaacaatcaaataaacaactctttatcaaaactaaaaaaccaacaaaca

SEQ ID NO: 48674 - DNA, 50 bp, synthetic construct
  source 1..50: mol_type = other DNA
aaaacgatcgaataaacgactctttatcgaaactaaaaaaccgacaaacg

SEQ ID NO: 48675 - DNA, 50 bp, synthetic construct
  source 1..50: mol_type = other DNA
aaaataaacaaaattataacatcacaaaactaacatttactcacaataca

SEQ ID NO: 48676 - DNA, 50 bp, synthetic construct
  source 1..50: mol_type = other DNA
aaaataaacaaaattataacgtcacgaaactaacgtttactcgcgatacg

SEQ ID NO: 48677 - DNA, 50 bp, synthetic construct
  source 1..50: mol_type = other DNA
ctaaaaaaataaacaaaattataacatcacaaaactaacatttactcaca

SEQ ID NO: 48678 - DNA, 50 bp, synthetic construct
  source 1..50: mol_type = other DNA
ctaaaaaaataaacaaaattataacgtcacgaaactaacgtttactcgcg

SEQ ID NO: 48679 - DNA, 50 bp, synthetic construct
  source 1..50: mol_type = other DNA
aactaaaaaaataaacaaaattataacatcacaaaactaacatttactca

SEQ ID NO: 48680 - DNA, 50 bp, synthetic construct
  source 1..50: mol_type = other DNA
aactaaaaaaataaacaaaattataacgtcacgaaactaacgtttactcg

SEQ ID NO: 48681 - DNA, 50 bp, synthetic construct
  source 1..50: mol_type = other DNA
tatcatcaaactaaaaaaataaacaaaattataacatcacaaaactaaca

SEQ ID NO: 48682 - DNA, 50 bp, synthetic construct
  source 1..50: mol_type = other DNA
tatcatcaaactaaaaaaataaacaaaattataacgtcacgaaactaacg

SEQ ID NO: 48683 - DNA, 50 bp, synthetic construct
  source 1..50: mol_type = other DNA
aactccaaatatcatcaaactaaaaaaataaacaaaattataacatcaca

SEQ ID NO: 48684 - DNA, 50 bp, synthetic construct
  source 1..50: mol_type = other DNA
aactccaaatatcatcaaactaaaaaaataaacaaaattataacgtcacg

SEQ ID NO: 48685 - DNA, 50 bp, synthetic construct
  source 1..50: mol_type = other DNA
tcaaccataaactacataaataaaacactaaaaacacacaaaataaaaca

SEQ ID NO: 48686 - DNA, 50 bp, synthetic construct
  source 1..50: mol_type = other DNA
tcaaccgtaaactacgtaaataaaacactaaaaacgcgcgaaataaaacg

SEQ ID NO: 48687 - DNA, 50 bp, synthetic construct
  source 1..50: mol_type = other DNA
ttttcccacaacaaatcttctaacttaacaaattccatacaataccacca

SEQ ID NO: 48688 - DNA, 50 bp, synthetic construct
  source 1..50: mol_type = other DNA
ttttcccgcaacaaatcttctaacttaacaaattccgtacaataccgccg

SEQ ID NO: 48689 - DNA, 50 bp, synthetic construct
  source 1..50: mol_type = other DNA
acaatcatatttaaaataaaaatatttaaaaactaaccccatctatccca

SEQ ID NO: 48690 - DNA, 50 bp, synthetic construct
  source 1..50: mol_type = other DNA
acgatcgtatttaaaataaaaatatttaaaaactaaccccgtctatcccg

SEQ ID NO: 48691 - DNA, 50 bp, synthetic construct
  source 1..50: mol_type = other DNA
acatcataccacaaacactccaatcccacataaaaaaactcttaatccca

SEQ ID NO: 48692 - DNA, 50 bp, synthetic construct
  source 1..50: mol_type = other DNA
acgtcataccacaaacactccaatcccacgtaaaaaaactcttaatcccg

SEQ ID NO: 48693 - DNA, 50 bp, synthetic construct
  source 1..50: mol_type = other DNA
caaaaaacaaaccaaatttcaaataaataaaacctccctaattaaaccca

SEQ ID NO: 48694 - DNA, 50 bp, synthetic construct
  source 1..50: mol_type = other DNA
cgaaaaacgaaccgaatttcgaataaataaaacctccctaattaaacccg

SEQ ID NO: 48695 - DNA, 50 bp, synthetic construct
  source 1..50: mol_type = other DNA
taaaaaattaaaactccacccctcttccacaaaaaacaaaccaaatttca

SEQ ID NO: 48696 - DNA, 50 bp, synthetic construct
  source 1..50: mol_type = other DNA
taaaaaattaaaactccacccctcttccgcgaaaaacgaaccgaatttcg

SEQ ID NO: 48697 - DNA, 50 bp, synthetic construct
  source 1..50: mol_type = other DNA
ataaaattaaaaaattaaaactccacccctcttccacaaaaaacaaacca

SEQ ID NO: 48698 - DNA, 50 bp, synthetic construct
  source 1..50: mol_type = other DNA
ataaaattaaaaaattaaaactccacccctcttccgcgaaaaacgaaccg

SEQ ID NO: 48699 - DNA, 50 bp, synthetic construct
  source 1..50: mol_type = other DNA
caaccttttaactccaccttaatctatacaacacaaaccaacccaaatca

SEQ ID NO: 48700 - DNA, 50 bp, synthetic construct
  source 1..50: mol_type = other DNA
caaccttttaactccaccttaatctatacaacgcgaaccaacccaaatcg

SEQ ID NO: 48701 - DNA, 50 bp, synthetic construct
  source 1..50: mol_type = other DNA
ccacaccaaaaccaacaaattaacccccaaaacctaaatctaactttaca

SEQ ID NO: 48702 - DNA, 50 bp, synthetic construct
  source 1..50: mol_type = other DNA
ccgcgccaaaaccaacaaattaacccccaaaacctaaatctaactttacg

SEQ ID NO: 48703 - DNA, 50 bp, synthetic construct
  source 1..50: mol_type = other DNA
tactaaccctaacacaacaaataaaaccctaacaatactaacttcattca

SEQ ID NO: 48704 - DNA, 50 bp, synthetic construct
  source 1..50: mol_type = other DNA
tactaaccctaacgcgacgaataaaaccctaacgatactaacttcattcg

SEQ ID NO: 48705 - DNA, 50 bp, synthetic construct
  source 1..50: mol_type = other DNA
cctaacacaacaaataaaaccctaacaatactaacttcattcaaaaaaca

SEQ ID NO: 48706 - DNA, 50 bp, synthetic construct
  source 1..50: mol_type = other DNA
cctaacgcgacgaataaaaccctaacgatactaacttcattcgaaaaacg

SEQ ID NO: 48707 - DNA, 50 bp, synthetic construct
  source 1..50: mol_type = other DNA
tttaaccaaaacaataaaactcaacataaatttcatactcttcaacctca

SEQ ID NO: 48708 - DNA, 50 bp, synthetic construct
  source 1..50: mol_type = other DNA
tttaaccgaaacaataaaactcaacgtaaatttcgtactcttcgacctcg

SEQ ID NO: 48709 - DNA, 50 bp, synthetic construct
  source 1..50: mol_type = other DNA
actctcaataactcatataaaaaattttcacaataaactactcctcatca

SEQ ID NO: 48710 - DNA, 50 bp, synthetic construct
  source 1..50: mol_type = other DNA
actctcgataactcatataaaaaattttcgcaataaactactcctcgtcg

SEQ ID NO: 48711 - DNA, 50 bp, synthetic construct
  source 1..50: mol_type = other DNA
ctaaacaacaaaaaacaactcactacaaaaactctctatataaatcatca

SEQ ID NO: 48712 - DNA, 50 bp, synthetic construct
  source 1..50: mol_type = other DNA
ctaaacgacgaaaaacaactcactacgaaaactctctatataaatcatcg

SEQ ID NO: 48713 - DNA, 50 bp, synthetic construct
  source 1..50: mol_type = other DNA
ctctatataaatcatcaaaaactacctacctaaataaacaaccaccctca

SEQ ID NO: 48714 - DNA, 50 bp, synthetic construct
  source 1..50: mol_type = other DNA
ctctatataaatcatcgaaaactacctacctaaataaacgaccaccctcg

SEQ ID NO: 48715 - DNA, 50 bp, synthetic construct
  source 1..50: mol_type = other DNA
ataaacaatcaattccaaaaataacacatccaacaaacaaacaactaaca

SEQ ID NO: 48716 - DNA, 50 bp, synthetic construct
  source 1..50: mol_type = other DNA
ataaacaatcgattccaaaaataacgcgtccaacaaacaaacgactaacg

SEQ ID NO: 48717 - DNA, 50 bp, synthetic construct
  source 1..50: mol_type = other DNA
cacactacaatctaacaactaaaaacttaaaaataactacccaaaaatca

SEQ ID NO: 48718 - DNA, 50 bp, synthetic construct
  source 1..50: mol_type = other DNA
cgcgctacaatctaacgactaaaaacttaaaaataactacccgaaaatcg

SEQ ID NO: 48719 - DNA, 50 bp, synthetic construct
  source 1..50: mol_type = other DNA
cctctaccacactacaatctaacaactaaaaacttaaaaataactaccca

SEQ ID NO: 48720 - DNA, 50 bp, synthetic construct
  source 1..50: mol_type = other DNA
cctctaccgcgctacaatctaacgactaaaaacttaaaaataactacccg

SEQ ID NO: 48721 - DNA, 50 bp, synthetic construct
  source 1..50: mol_type = other DNA
ctataaactacacttattccattaaaacaaaaacccttatttctacaaca

SEQ ID NO: 48722 - DNA, 50 bp, synthetic construct
  source 1..50: mol_type = other DNA
ctataaactacgcttattccgttaaaacaaaaacccttatttctacgacg

SEQ ID NO: 48723 - DNA, 50 bp, synthetic construct
  source 1..50: mol_type = other DNA
aaactacacttattccattaaaacaaaaacccttatttctacaacaacca

SEQ ID NO: 48724 - DNA, 50 bp, synthetic construct
  source 1..50: mol_type = other DNA
aaactacgcttattccgttaaaacaaaaacccttatttctacgacgaccg

SEQ ID NO: 48725 - DNA, 50 bp, synthetic construct
  source 1..50: mol_type = other DNA
actacacttattccattaaaacaaaaacccttatttctacaacaaccaca

SEQ ID NO: 48726 - DNA, 50 bp, synthetic construct
  source 1..50: mol_type = other DNA
actacgcttattccgttaaaacaaaaacccttatttctacgacgaccgcg

SEQ ID NO: 48727 - DNA, 50 bp, synthetic construct
  source 1..50: mol_type = other DNA
taacttccaacccataacaataattaataactcaatatccttccaacaca

SEQ ID NO: 48728 - DNA, 50 bp, synthetic construct
  source 1..50: mol_type = other DNA
taacttccgacccataacgataattaataactcaatatccttccaacgcg

SEQ ID NO: 48729 - DNA, 50 bp, synthetic construct
  source 1..50: mol_type = other DNA
aacaaaacataacacaacccccaaccctaaaaaattaattccaataacca

SEQ ID NO: 48730 - DNA, 50 bp, synthetic construct
  source 1..50: mol_type = other DNA
aacgaaacataacgcgacccccaaccctaaaaaattaattccgataaccg

SEQ ID NO: 48731 - DNA, 50 bp, synthetic construct
  source 1..50: mol_type = other DNA
aacataacaaaacctcatctctaccaaaaatacaaaaaattaaccaaaca

SEQ ID NO: 48732 - DNA, 50 bp, synthetic construct
  source 1..50: mol_type = other DNA
aacataacgaaacctcgtctctaccaaaaatacaaaaaattaaccgaacg

SEQ ID NO: 48733 - DNA, 50 bp, synthetic construct
  source 1..50: mol_type = other DNA
ttacaaaacactaaaacccatacaacaaccaaacaacaaaataaactcca

SEQ ID NO: 48734 - DNA, 50 bp, synthetic construct
  source 1..50: mol_type = other DNA
ttacgaaacgctaaaacccgtacaacaaccgaacaacaaaataaactccg

SEQ ID NO: 48735 - DNA, 50 bp, synthetic construct
  source 1..50: mol_type = other DNA
catcttaactactcaactctccaaaaccttttcctacaataataactcca

SEQ ID NO: 48736 - DNA, 50 bp, synthetic construct
  source 1..50: mol_type = other DNA
catcttaactactcaactctccgaaaccttttcctacaataataactccg

SEQ ID NO: 48737 - DNA, 50 bp, synthetic construct
  source 1..50: mol_type = other DNA
aactaaaattaaaccaaaaatcaaaaccattactacaaaaaaaaatccca

SEQ ID NO: 48738 - DNA, 50 bp, synthetic construct
  source 1..50: mol_type = other DNA
aactaaaattaaaccgaaaatcgaaaccattactacaaaaaaaaatcccg

SEQ ID NO: 48739 - DNA, 50 bp, synthetic construct
  source 1..50: mol_type = other DNA
cattctctctctctaaacatacacaaaacaccaaaaaaacctcaacccca

SEQ ID NO: 48740 - DNA, 50 bp, synthetic construct
  source 1..50: mol_type = other DNA
cattctctctctctaaacatacacaaaacaccgaaaaaacctcaaccccg

SEQ ID NO: 48741 - DNA, 50 bp, synthetic construct
  source 1..50: mol_type = other DNA
aaaaaacacaaaaacacaaaaaaacacacaaaaaactacttaaaaaacca

SEQ ID NO: 48742 - DNA, 50 bp, synthetic construct
  source 1..50: mol_type = other DNA
aaaaaacgcgaaaacgcaaaaaaacgcgcgaaaaactacttaaaaaaccg

SEQ ID NO: 48743 - DNA, 50 bp, synthetic construct
  source 1..50: mol_type = other DNA
aaaacacaaaaacacaaaaaaacacacaaaaaactacttaaaaaaccaca

SEQ ID NO: 48744 - DNA, 50 bp, synthetic construct
  source 1..50: mol_type = other DNA
aaaacgcgaaaacgcaaaaaaacgcgcgaaaaactacttaaaaaaccgcg

SEQ ID NO: 48745 - DNA, 50 bp, synthetic construct
  source 1..50: mol_type = other DNA
aaactaaaacacctaaaaaataaacaaaatcccaaaactacaaaaccaca

SEQ ID NO: 48746 - DNA, 50 bp, synthetic construct
  source 1..50: mol_type = other DNA
aaactaaaacgcctaaaaaataaacaaaatcccgaaactacaaaaccgcg

SEQ ID NO: 48747 - DNA, 50 bp, synthetic construct
  source 1..50: mol_type = other DNA
tataactcaacaaaaactacaaaaaaatacacaaaccaaaccaaaccaca

SEQ ID NO: 48748 - DNA, 50 bp, synthetic construct
  source 1..50: mol_type = other DNA
tataactcgacaaaaactacaaaaaaatacgcgaaccgaaccgaaccgcg

SEQ ID NO: 48749 - DNA, 50 bp, synthetic construct
  source 1..50: mol_type = other DNA
actataactcaacaaaaactacaaaaaaatacacaaaccaaaccaaacca

SEQ ID NO: 48750 - DNA, 50 bp, synthetic construct
  source 1..50: mol_type = other DNA
actataactcgacaaaaactacaaaaaaatacgcgaaccgaaccgaaccg

SEQ ID NO: 48751 - DNA, 50 bp, synthetic construct
  source 1..50: mol_type = other DNA
attcaacaacatacaactataactcaacaaaaactacaaaaaaatacaca

SEQ ID NO: 48752 - DNA, 50 bp, synthetic construct
  source 1..50: mol_type = other DNA
attcgacaacgtacgactataactcgacaaaaactacaaaaaaatacgcg

SEQ ID NO: 48753 - DNA, 50 bp, synthetic construct
  source 1..50: mol_type = other DNA
caattcaacaacatacaactataactcaacaaaaactacaaaaaaataca

SEQ ID NO: 48754 - DNA, 50 bp, synthetic construct
  source 1..50: mol_type = other DNA
caattcgacaacgtacgactataactcgacaaaaactacaaaaaaatacg

SEQ ID NO: 48755 - DNA, 50 bp, synthetic construct
  source 1..50: mol_type = other DNA
atctcaaataaaaactcacacctacttaaaaaacaacaacaaaacctaca

SEQ ID NO: 48756 - DNA, 50 bp, synthetic construct
  source 1..50: mol_type = other DNA
atctcgaataaaaactcacacctacttaaaaaacgacaacgaaacctacg

SEQ ID NO: 48757 - DNA, 50 bp, synthetic construct
  source 1..50: mol_type = other DNA
ctccctccctaaatcacccaatccatccaactctttttctttaaataaca

SEQ ID NO: 48758 - DNA, 50 bp, synthetic construct
  source 1..50: mol_type = other DNA
ctccctccctaaatcacccaatccatccgactctttttctttaaataacg

SEQ ID NO: 48759 - DNA, 50 bp, synthetic construct
  source 1..50: mol_type = other DNA
atccacactacaatccaaaaatacatacaaaaaccaaaaacaaaatacca

SEQ ID NO: 48760 - DNA, 50 bp, synthetic construct
  source 1..50: mol_type = other DNA
atccgcactacaatccgaaaatacgtacgaaaaccgaaaacaaaataccg

SEQ ID NO: 48761 - DNA, 50 bp, synthetic construct
  source 1..50: mol_type = other DNA
aatcctcaaatatatatatatcaaaaccaataccctacttccaattccca

SEQ ID NO: 48762 - DNA, 50 bp, synthetic construct
  source 1..50: mol_type = other DNA
aatcctcaaatatatatatatcgaaaccgataccctacttccgattcccg

SEQ ID NO: 48763 - DNA, 50 bp, synthetic construct
  source 1..50: mol_type = other DNA
ctcaaatatatatatatcaaaaccaataccctacttccaattcccacaca

SEQ ID NO: 48764 - DNA, 50 bp, synthetic construct
  source 1..50: mol_type = other DNA
ctcaaatatatatatatcgaaaccgataccctacttccgattcccgcacg

SEQ ID NO: 48765 - DNA, 50 bp, synthetic construct
  source 1..50: mol_type = other DNA
tacaaaccccttctataaacacacaataaaacacaattttaaaaatcaca

SEQ ID NO: 48766 - DNA, 50 bp, synthetic construct
  source 1..50: mol_type = other DNA
tacgaaccccttctataaacgcgcgataaaacgcgattttaaaaatcacg

SEQ ID NO: 48767 - DNA, 50 bp, synthetic construct
  source 1..50: mol_type = other DNA
taaactcaaaatccaataaaatttccccacacaaattcaaatcctattca

SEQ ID NO: 48768 - DNA, 50 bp, synthetic construct
  source 1..50: mol_type = other DNA
taaactcgaaatccaataaaatttccccgcacaaattcgaatcctattcg

SEQ ID NO: 48769 - DNA, 50 bp, synthetic construct
  source 1..50: mol_type = other DNA
aaacattccaaaaaccaacctaaacaaaaacaataaaacctaaaccccca

SEQ ID NO: 48770 - DNA, 50 bp, synthetic construct
  source 1..50: mol_type = other DNA
aaacattccgaaaaccaacctaaacaaaaacgataaaacctaaacccccg

SEQ ID NO: 48771 - DNA, 50 bp, synthetic construct
  source 1..50: mol_type = other DNA
aaaaaaaaccaaactataacacttcaaaaacaaaaatttaaattccacca

SEQ ID NO: 48772 - DNA, 50 bp, synthetic construct
  source 1..50: mol_type = other DNA
aaaaaaaaccaaactataacgcttcgaaaacgaaaatttaaattccaccg

SEQ ID NO: 48773 - DNA, 50 bp, synthetic construct
  source 1..50: mol_type = other DNA
tcccttcccaaaaaaaactaaaacccaacaccaaaacaatactataacca

SEQ ID NO: 48774 - DNA, 50 bp, synthetic construct
  source 1..50: mol_type = other DNA
tcccttcccgaaaaaaactaaaacccgacaccaaaacaatactataaccg

SEQ ID NO: 48775 - DNA, 50 bp, synthetic construct
  source 1..50: mol_type = other DNA
attacataacaacaataaacaaaacaaaaaatccatctaaaacaacaaca

SEQ ID NO: 48776 - DNA, 50 bp, synthetic construct
  source 1..50: mol_type = other DNA
attacgtaacaacgataaacgaaacaaaaaatccgtctaaaacgacgacg

SEQ ID NO: 48777 - DNA, 50 bp, synthetic construct
  source 1..50: mol_type = other DNA
caaattacataacaacaataaacaaaacaaaaaatccatctaaaacaaca

SEQ ID NO: 48778 - DNA, 50 bp, synthetic construct
  source 1..50: mol_type = other DNA
cgaattacgtaacaacgataaacgaaacaaaaaatccgtctaaaacgacg

SEQ ID NO: 48779 - DNA, 50 bp, synthetic construct
  source 1..50: mol_type = other DNA
caaaatcattacaaaaaaacaaacctacaacataacctactacaaatcca

SEQ ID NO: 48780 - DNA, 50 bp, synthetic construct
  source 1..50: mol_type = other DNA
cgaaatcattacgaaaaaacaaacctacaacgtaacctactacgaatccg

SEQ ID NO: 48781 - DNA, 50 bp, synthetic construct
  source 1..50: mol_type = other DNA
taaatatttcaaaaaactccacaaatattcaaaaaaccatcataaataca

SEQ ID NO: 48782 - DNA, 50 bp, synthetic construct
  source 1..50: mol_type = other DNA
taaatatttcaaaaaactccacaaatattcgaaaaaccatcgtaaatacg

SEQ ID NO: 48783 - DNA, 50 bp, synthetic construct
  source 1..50: mol_type = other DNA
aactatctccaaaattcctttaatacctaaaattcacccccttcacaaca

SEQ ID NO: 48784 - DNA, 50 bp, synthetic construct
  source 1..50: mol_type = other DNA
aactatctccaaaattcctttaatacctaaaattcgcccccttcgcgacg

SEQ ID NO: 48785 - DNA, 50 bp, synthetic construct
  source 1..50: mol_type = other DNA
aataaaatcttactaaccaaatcttccaaaaccctcatcccaacaaacca

SEQ ID NO: 48786 - DNA, 50 bp, synthetic construct
  source 1..50: mol_type = other DNA
aataaaatcttactaaccaaatcttccgaaaccctcatcccgacaaaccg

SEQ ID NO: 48787 - DNA, 50 bp, synthetic construct
  source 1..50: mol_type = other DNA
aaaaaaccccctaccaaaatactcttttaatctcaaaccacaaaataaca

SEQ ID NO: 48788 - DNA, 50 bp, synthetic construct
  source 1..50: mol_type = other DNA
aaaaaaccccctaccgaaatactcttttaatctcaaaccgcgaaataacg

SEQ ID NO: 48789 - DNA, 50 bp, synthetic construct
  source 1..50: mol_type = other DNA
ttaaaactaaaaaaccccctaccaaaatactcttttaatctcaaaccaca

SEQ ID NO: 48790 - DNA, 50 bp, synthetic construct
  source 1..50: mol_type = other DNA
ttaaaactaaaaaaccccctaccgaaatactcttttaatctcaaaccgcg

SEQ ID NO: 48791 - DNA, 50 bp, synthetic construct
  source 1..50: mol_type = other DNA
atcttcattatactaaaaacaaatatctatactaaaataacaaattcaca

SEQ ID NO: 48792 - DNA, 50 bp, synthetic construct
  source 1..50: mol_type = other DNA
atcttcattatactaaaaacaaatatctatactaaaataacgaattcgcg

SEQ ID NO: 48793 - DNA, 50 bp, synthetic construct
  source 1..50: mol_type = other DNA
ctaaaaacaaatatctatactaaaataacaaattcacaaaataaaaatca

SEQ ID NO: 48794 - DNA, 50 bp, synthetic construct
  source 1..50: mol_type = other DNA
ctaaaaacaaatatctatactaaaataacgaattcgcgaaataaaaatcg

SEQ ID NO: 48795 - DNA, 50 bp, synthetic construct
  source 1..50: mol_type = other DNA
atacccatcctttatcttaatcactcaacctaaacaaaacaaataaatca

SEQ ID NO: 48796 - DNA, 50 bp, synthetic construct
  source 1..50: mol_type = other DNA
atacccgtcctttatcttaatcactcgacctaaacgaaacaaataaatcg

SEQ ID NO: 48797 - DNA, 50 bp, synthetic construct
  source 1..50: mol_type = other DNA
catttatttaaccatcctcccacctcaatttatctattccattcaaacca

SEQ ID NO: 48798 - DNA, 50 bp, synthetic construct
  source 1..50: mol_type = other DNA
catttatttaaccatcctcccacctcgatttatctattccgttcaaaccg

SEQ ID NO: 48799 - DNA, 50 bp, synthetic construct
  source 1..50: mol_type = other DNA
taaaaaataaaaacatcacctacataaacaacaacatacaataaaattca

SEQ ID NO: 48800 - DNA, 50 bp, synthetic construct
  source 1..50: mol_type = other DNA
taaaaaataaaaacatcgcctacgtaaacaacaacatacaataaaattcg

SEQ ID NO: 48801 - DNA, 50 bp, synthetic construct
  source 1..50: mol_type = other DNA
catccataaaaaaactccactctaaaaattctaactaaaacaaactccca

SEQ ID NO: 48802 - DNA, 50 bp, synthetic construct
  source 1..50: mol_type = other DNA
cgtccgtaaaaaaactccactctaaaaattctaactaaaacgaactcccg

SEQ ID NO: 48803 - DNA, 50 bp, synthetic construct
  source 1..50: mol_type = other DNA
tccataaaaaaactccactctaaaaattctaactaaaacaaactcccaca

SEQ ID NO: 48804 - DNA, 50 bp, synthetic construct
  source 1..50: mol_type = other DNA
tccgtaaaaaaactccactctaaaaattctaactaaaacgaactcccgcg

SEQ ID NO: 48805 - DNA, 50 bp, synthetic construct
  source 1..50: mol_type = other DNA
ccaaatccccaaaaacaccaactcaattaaaaaaaacacaacataaaaca

SEQ ID NO: 48806 - DNA, 50 bp, synthetic construct
  source 1..50: mol_type = other DNA
ccaaatccccaaaaacaccgactcgattaaaaaaaacgcgacataaaacg

SEQ ID NO: 48807 - DNA, 50 bp, synthetic construct
  source 1..50: mol_type = other DNA
caattaaaaaaaacacaacataaaacaaaacaaaaactacaaaaacccca

SEQ ID NO: 48808 - DNA, 50 bp, synthetic construct
  source 1..50: mol_type = other DNA
cgattaaaaaaaacgcgacataaaacgaaacgaaaactacgaaaaccccg

SEQ ID NO: 48809 - DNA, 50 bp, synthetic construct
  source 1..50: mol_type = other DNA
caaaataaaacaaaaaacactacaaccaaaatccatttacacaaaaaaca

SEQ ID NO: 48810 - DNA, 50 bp, synthetic construct
  source 1..50: mol_type = other DNA
caaaataaaacgaaaaacgctacgaccgaaatccgtttacgcgaaaaacg

SEQ ID NO: 48811 - DNA, 50 bp, synthetic construct
  source 1..50: mol_type = other DNA
taaaaccaccaaaataaaacaaaaaacactacaaccaaaatccatttaca

SEQ ID NO: 48812 - DNA, 50 bp, synthetic construct
  source 1..50: mol_type = other DNA
taaaaccgccaaaataaaacgaaaaacgctacgaccgaaatccgtttacg

SEQ ID NO: 48813 - DNA, 50 bp, synthetic construct
  source 1..50: mol_type = other DNA
atacaaaaactactaaaaccaccaaaataaaacaaaaaacactacaacca

SEQ ID NO: 48814 - DNA, 50 bp, synthetic construct
  source 1..50: mol_type = other DNA
atacaaaaactactaaaaccgccaaaataaaacgaaaaacgctacgaccg

SEQ ID NO: 48815 - DNA, 50 bp, synthetic construct
  source 1..50: mol_type = other DNA
attcaatcctcaatttaaaaaacaccacaaaactaaaacccaaatttcca

SEQ ID NO: 48816 - DNA, 50 bp, synthetic construct
  source 1..50: mol_type = other DNA
gttcgatcctcaatttaaaaaacaccgcgaaactaaaacccaaatttccg

SEQ ID NO: 48817 - DNA, 50 bp, synthetic construct
  source 1..50: mol_type = other DNA
ctaaataaaatctaaccaaccattcaatcctcaatttaaaaaacaccaca

SEQ ID NO: 48818 - DNA, 50 bp, synthetic construct
  source 1..50: mol_type = other DNA
ctaaataaaatctaaccaaccgttcgatcctcaatttaaaaaacaccgcg

SEQ ID NO: 48819 - DNA, 50 bp, synthetic construct
  source 1..50: mol_type = other DNA
accaattcctcctaatctataaaaaatttcaaaatataaaatcactaaca

SEQ ID NO: 48820 - DNA, 50 bp, synthetic construct
  source 1..50: mol_type = other DNA
gccaattcctcctaatctataaaaaatttcgaaatataaaatcgctaacg

SEQ ID NO: 48821 - DNA, 50 bp, synthetic construct
  source 1..50: mol_type = other DNA
aaccataacaacaacataacataaaaataccaaaatctacaaaaacaaca

SEQ ID NO: 48822 - DNA, 50 bp, synthetic construct
  source 1..50: mol_type = other DNA
aaccataacaacaacgtaacgtaaaaataccgaaatctacgaaaacaacg

SEQ ID NO: 48823 - DNA, 50 bp, synthetic construct
  source 1..50: mol_type = other DNA
aattcaaaacctctaaacacaaaaacaacaaaaaacaacaacacctctca

SEQ ID NO: 48824 - DNA, 50 bp, synthetic construct
  source 1..50: mol_type = other DNA
aattcgaaacctctaaacgcaaaaacgacgaaaaacgacaacacctctcg

SEQ ID NO: 48825 - DNA, 50 bp, synthetic construct
  source 1..50: mol_type = other DNA
ttctaacctacccaacaacctaaacaaaaacaaaacaaaaaatactacca

SEQ ID NO: 48826 - DNA, 50 bp, synthetic construct
  source 1..50: mol_type = other DNA
ttctaacctacccgacaacctaaacgaaaacaaaacgaaaaatactaccg

SEQ ID NO: 48827 - DNA, 50 bp, synthetic construct
  source 1..50: mol_type = other DNA
caacaaaaaacaacaactaaactaattcaaaacctctaaacacaaaaaca

SEQ ID NO: 48828 - DNA, 50 bp, synthetic construct
  source 1..50: mol_type = other DNA
cgacaaaaaacaacgactaaactaattcgaaacctctaaacgcaaaaacg

SEQ ID NO: 48829 - DNA, 50 bp, synthetic construct
  source 1..50: mol_type = other DNA
aaacaaaacaacaaaaaacaacaactaaactaattcaaaacctctaaaca

SEQ ID NO: 48830 - DNA, 50 bp, synthetic construct
  source 1..50: mol_type = other DNA
aaacgaaacgacaaaaaacaacgactaaactaattcgaaacctctaaacg

SEQ ID NO: 48831 - DNA, 50 bp, synthetic construct
  source 1..50: mol_type = other DNA
tcattaatcacaacaataacaaaaaacctaaaaacaaaaccaattacaca

SEQ ID NO: 48832 - DNA, 50 bp, synthetic construct
  source 1..50: mol_type = other DNA
tcattaatcgcgacgataacaaaaaacctaaaaacgaaaccgattacgcg

SEQ ID NO: 48833 - DNA, 50 bp, synthetic construct
  source 1..50: mol_type = other DNA
ctctcacctcattaatcacaacaataacaaaaaacctaaaaacaaaacca

SEQ ID NO: 48834 - DNA, 50 bp, synthetic construct
  source 1..50: mol_type = other DNA
ctctcacctcattaatcgcgacgataacaaaaaacctaaaaacgaaaccg

SEQ ID NO: 48835 - DNA, 50 bp, synthetic construct
  source 1..50: mol_type = other DNA
acaaaccccaaaattccacaataaaaaaatactatactaaaatacaaaca

SEQ ID NO: 48836 - DNA, 50 bp, synthetic construct
  source 1..50: mol_type = other DNA
acgaaccccgaaattccgcgataaaaaaatactatactaaaatacaaacg

SEQ ID NO: 48837 - DNA, 50 bp, synthetic construct
  source 1..50: mol_type = other DNA
aaaccccaaaattccacaataaaaaaatactatactaaaatacaaacaca

SEQ ID NO: 48838 - DNA, 50 bp, synthetic construct
  source 1..50: mol_type = other DNA
gaaccccgaaattccgcgataaaaaaatactatactaaaatacaaacgcg

SEQ ID NO: 48839 - DNA, 50 bp, synthetic construct
  source 1..50: mol_type = other DNA
ctttcacttattaataaaaaaaacaacaaatcccataaaaaaacaactca

SEQ ID NO: 48840 - DNA, 50 bp, synthetic construct
  source 1..50: mol_type = other DNA
ctttcgcttattaataaaaaaaacaacaaatcccataaaaaaacgactcg

SEQ ID NO: 48841 - DNA, 50 bp, synthetic construct
  source 1..50: mol_type = other DNA
cctcaaactacccaaatcttaacaactaaaactaacttaccttcaaacca

SEQ ID NO: 48842 - DNA, 50 bp, synthetic construct
  source 1..50: mol_type = other DNA
cctcgaactacccaaatcttaacgactaaaactaacttaccttcgaaccg

SEQ ID NO: 48843 - DNA, 50 bp, synthetic construct
  source 1..50: mol_type = other DNA
cataactcaacctcctaaataactaaaattaacaaatatacaccaccaca

SEQ ID NO: 48844 - DNA, 50 bp, synthetic construct
  source 1..50: mol_type = other DNA
cgtaactcaacctcctaaataactaaaattaacaaatatacaccaccacg

SEQ ID NO: 48845 - DNA, 50 bp, synthetic construct
  source 1..50: mol_type = other DNA
atacacacctactaaccccaactactcaaaaaactaaatcacaaaaatca

SEQ ID NO: 48846 - DNA, 50 bp, synthetic construct
  source 1..50: mol_type = other DNA
atacacacctactaaccccaactactcaaaaaactaaatcacgaaaatcg

SEQ ID NO: 48847 - DNA, 50 bp, synthetic construct
  source 1..50: mol_type = other DNA
ctatttccatttctccaaacctattatttaaaccttcaataaccacacca

SEQ ID NO: 48848 - DNA, 50 bp, synthetic construct
  source 1..50: mol_type = other DNA
ctatttccatttctccaaacctattatttaaaccttcgataaccacgccg

SEQ ID NO: 48849 - DNA, 50 bp, synthetic construct
  source 1..50: mol_type = other DNA
cccctttcatttcaaacatacaaaataacaacaaaatcaacctcctcaca

SEQ ID NO: 48850 - DNA, 50 bp, synthetic construct
  source 1..50: mol_type = other DNA
cccctttcatttcaaacatacgaaataacaacaaaatcgacctcctcacg

SEQ ID NO: 48851 - DNA, 50 bp, synthetic construct
  source 1..50: mol_type = other DNA
cctttcatttcaaacatacaaaataacaacaaaatcaacctcctcacaca

SEQ ID NO: 48852 - DNA, 50 bp, synthetic construct
  source 1..50: mol_type = other DNA
cctttcatttcaaacatacgaaataacaacaaaatcgacctcctcacgcg

SEQ ID NO: 48853 - DNA, 50 bp, synthetic construct
  source 1..50: mol_type = other DNA
aacatacaaaataacaacaaaatcaacctcctcacacattctaaactaca

SEQ ID NO: 48854 - DNA, 50 bp, synthetic construct
  source 1..50: mol_type = other DNA
aacatacgaaataacaacaaaatcgacctcctcacgcgttctaaactacg

SEQ ID NO: 48855 - DNA, 50 bp, synthetic construct
  source 1..50: mol_type = other DNA
tacacttaactaaccaccaaccctacataaaactacaaaaccatatacca

SEQ ID NO: 48856 - DNA, 50 bp, synthetic construct
  source 1..50: mol_type = other DNA
tacgcttaactaaccgccaaccctacgtaaaactacaaaaccatataccg

SEQ ID NO: 48857 - DNA, 50 bp, synthetic construct
  source 1..50: mol_type = other DNA
ccaaaaaaaaaacacaacacataatcctataacttcacacaaaactaaca

SEQ ID NO: 48858 - DNA, 50 bp, synthetic construct
  source 1..50: mol_type = other DNA
ccaaaaaaaaaacgcgacacataatcctataacttcacgcaaaactaacg

SEQ ID NO: 48859 - DNA, 50 bp, synthetic construct
  source 1..50: mol_type = other DNA
tcaccttaattcccaaaaaccaaacaaccacaataaataaaaccataaca

SEQ ID NO: 48860 - DNA, 50 bp, synthetic construct
  source 1..50: mol_type = other DNA
tcaccttaattcccaaaaaccgaacgaccgcaataaataaaaccataacg

SEQ ID NO: 48861 - DNA, 50 bp, synthetic construct
  source 1..50: mol_type = other DNA
cttaattcccaaaaaccaaacaaccacaataaataaaaccataacaaaca

SEQ ID NO: 48862 - DNA, 50 bp, synthetic construct
  source 1..50: mol_type = other DNA
cttaattcccaaaaaccgaacgaccgcaataaataaaaccataacgaacg

SEQ ID NO: 48863 - DNA, 50 bp, synthetic construct
  source 1..50: mol_type = other DNA
aaaaaaaactacaacaaaaacaaaaaccaccaccactacaccaaaaacca

SEQ ID NO: 48864 - DNA, 50 bp, synthetic construct
  source 1..50: mol_type = other DNA
aaaaaaaactacgacaaaaacaaaaaccgccgccgctacaccaaaaaccg

SEQ ID NO: 48865 - DNA, 50 bp, synthetic construct
  source 1..50: mol_type = other DNA
tcaaattccaaccaataaacaaaacctccttaaaaaccccaaactaaaca

SEQ ID NO: 48866 - DNA, 50 bp, synthetic construct
  source 1..50: mol_type = other DNA
tcgaattccgaccaataaacgaaacctccttaaaaaccccgaactaaacg

SEQ ID NO: 48867 - DNA, 50 bp, synthetic construct
  source 1..50: mol_type = other DNA
aataaccaaacccaaaaaaaatcccttaaaaaaaacaaactcaaattcca

SEQ ID NO: 48868 - DNA, 50 bp, synthetic construct
  source 1..50: mol_type = other DNA
aataaccgaacccgaaaaaaatcccttaaaaaaaacgaactcgaattccg

SEQ ID NO: 48869 - DNA, 50 bp, synthetic construct
  source 1..50: mol_type = other DNA
aaaaataaattaacaattacataaaaactacaaacactaaaaaactacca

SEQ ID NO: 48870 - DNA, 50 bp, synthetic construct
  source 1..50: mol_type = other DNA
aaaaataaattaacgattacgtaaaaactacaaacactaaaaaactaccg

SEQ ID NO: 48871 - DNA, 50 bp, synthetic construct
  source 1..50: mol_type = other DNA
caaccctaaaaacaaaaataaaacaaatacaaacaacaaaacactaaaca

SEQ ID NO: 48872 - DNA, 50 bp, synthetic construct
  source 1..50: mol_type = other DNA
cgaccctaaaaacaaaaataaaacgaatacgaacgacgaaacgctaaacg

SEQ ID NO: 48873 - DNA, 50 bp, synthetic construct
  source 1..50: mol_type = other DNA
acaacaacaaccctaaaaacaaaaataaaacaaatacaaacaacaaaaca

SEQ ID NO: 48874 - DNA, 50 bp, synthetic construct
  source 1..50: mol_type = other DNA
acgacgacgaccctaaaaacaaaaataaaacgaatacgaacgacgaaacg

SEQ ID NO: 48875 - DNA, 50 bp, synthetic construct
  source 1..50: mol_type = other DNA
cttaaaccacaacaacaaccctaaaaacaaaaataaaacaaatacaaaca

SEQ ID NO: 48876 - DNA, 50 bp, synthetic construct
  source 1..50: mol_type = other DNA
cttaaaccacgacgacgaccctaaaaacaaaaataaaacgaatacgaacg

SEQ ID NO: 48877 - DNA, 50 bp, synthetic construct
  source 1..50: mol_type = other DNA
aacacttaaaccacaacaacaaccctaaaaacaaaaataaaacaaataca

SEQ ID NO: 48878 - DNA, 50 bp, synthetic construct
  source 1..50: mol_type = other DNA
aacgcttaaaccacgacgacgaccctaaaaacaaaaataaaacgaatacg

SEQ ID NO: 48879 - DNA, 50 bp, synthetic construct
  source 1..50: mol_type = other DNA
aaaccaaaataaaaatccaacaatcttccaacacttaaaccacaacaaca

SEQ ID NO: 48880 - DNA, 50 bp, synthetic construct
  source 1..50: mol_type = other DNA
aaaccaaaataaaaatccaacgatcttccaacgcttaaaccacgacgacg

SEQ ID NO: 48881 - DNA, 50 bp, synthetic construct
  source 1..50: mol_type = other DNA
ctaaaaccaaaataaaaatccaacaatcttccaacacttaaaccacaaca

SEQ ID NO: 48882 - DNA, 50 bp, synthetic construct
  source 1..50: mol_type = other DNA
ctaaaaccaaaataaaaatccaacgatcttccaacgcttaaaccacgacg

SEQ ID NO: 48883 - DNA, 50 bp, synthetic construct
  source 1..50: mol_type = other DNA
ccactaaaaccaaaataaaaatccaacaatcttccaacacttaaaccaca

SEQ ID NO: 48884 - DNA, 50 bp, synthetic construct
  source 1..50: mol_type = other DNA
ccactaaaaccaaaataaaaatccaacgatcttccaacgcttaaaccacg

SEQ ID NO: 48885 - DNA, 50 bp, synthetic construct
  source 1..50: mol_type = other DNA
cccacttaaataccaattaacatcaaaaaaactaaatcaaacaatcacca

SEQ ID NO: 48886 - DNA, 50 bp, synthetic construct
  source 1..50: mol_type = other DNA
cccgcttaaataccaattaacgtcaaaaaaactaaatcaaacgatcgccg

SEQ ID NO: 48887 - DNA, 50 bp, synthetic construct
  source 1..50: mol_type = other DNA
aatcccacttaaataccaattaacatcaaaaaaactaaatcaaacaatca

SEQ ID NO: 48888 - DNA, 50 bp, synthetic construct
  source 1..50: mol_type = other DNA
aatcccgcttaaataccaattaacgtcaaaaaaactaaatcaaacgatcg

SEQ ID NO: 48889 - DNA, 50 bp, synthetic construct
  source 1..50: mol_type = other DNA
ttaaaatcaatatctaattaaaactcacaccacaacacactaaaatccca

SEQ ID NO: 48890 - DNA, 50 bp, synthetic construct
  source 1..50: mol_type = other DNA
ttaaaatcgatatctaattaaaactcgcaccgcaacacgctaaaatcccg

SEQ ID NO: 48891 - DNA, 50 bp, synthetic construct
  source 1..50: mol_type = other DNA
aaatttaaaaaaacaaatttaaaatcaatatctaattaaaactcacacca

SEQ ID NO: 48892 - DNA, 50 bp, synthetic construct
  source 1..50: mol_type = other DNA
aaatttaaaaaaacgaatttaaaatcgatatctaattaaaactcgcaccg

SEQ ID NO: 48893 - DNA, 50 bp, synthetic construct
  source 1..50: mol_type = other DNA
tcctaaactacctattcacacaaaaatttaaaaaaacaaatttaaaatca

SEQ ID NO: 48894 - DNA, 50 bp, synthetic construct
  source 1..50: mol_type = other DNA
tcctaaactacctattcgcgcgaaaatttaaaaaaacgaatttaaaatcg

SEQ ID NO: 48895 - DNA, 50 bp, synthetic construct
  source 1..50: mol_type = other DNA
taaccaaaatccttactattcaaaaacctctcctaaactacctattcaca

SEQ ID NO: 48896 - DNA, 50 bp, synthetic construct
  source 1..50: mol_type = other DNA
taaccgaaatccttactattcgaaaacctctcctaaactacctattcgcg

SEQ ID NO: 48897 - DNA, 50 bp, synthetic construct
  source 1..50: mol_type = other DNA
acccctaataatcacataaatctattcaccacacaaatctaaatccttca

SEQ ID NO: 48898 - DNA, 50 bp, synthetic construct
  source 1..50: mol_type = other DNA
acccctaataatcacgtaaatctattcgccacgcaaatctaaatccttcg

SEQ ID NO: 48899 - DNA, 50 bp, synthetic construct
  source 1..50: mol_type = other DNA
ctcctattctacaactaacccctaataatcacataaatctattcaccaca

SEQ ID NO: 48900 - DNA, 50 bp, synthetic construct
  source 1..50: mol_type = other DNA
ctcctattctacgactaacccctaataatcacgtaaatctattcgccacg

SEQ ID NO: 48901 - DNA, 50 bp, synthetic construct
  source 1..50: mol_type = other DNA
atcatcacttaaaaccactcctattctacaactaacccctaataatcaca

SEQ ID NO: 48902 - DNA, 50 bp, synthetic construct
  source 1..50: mol_type = other DNA
atcgtcgcttaaaaccactcctattctacgactaacccctaataatcacg

SEQ ID NO: 48903 - DNA, 50 bp, synthetic construct
  source 1..50: mol_type = other DNA
acccaaacttacataacaaacaaatccacataaccaccaaaaatcaacca

SEQ ID NO: 48904 - DNA, 50 bp, synthetic construct
  source 1..50: mol_type = other DNA
acccaaacttacgtaacgaacaaatccacgtaaccaccaaaaatcaaccg

SEQ ID NO: 48905 - DNA, 50 bp, synthetic construct
  source 1..50: mol_type = other DNA
cacataaccaccaaaaatcaaccataaaataaaaataaccttaaacaaca

SEQ ID NO: 48906 - DNA, 50 bp, synthetic construct
  source 1..50: mol_type = other DNA
cacgtaaccaccaaaaatcaaccgtaaaataaaaataaccttaaacgacg

SEQ ID NO: 48907 - DNA, 50 bp, synthetic construct
  source 1..50: mol_type = other DNA
aaatcaaccataaaataaaaataaccttaaacaacaacaaaatccaaaca

SEQ ID NO: 48908 - DNA, 50 bp, synthetic construct
  source 1..50: mol_type = other DNA
aaatcaaccgtaaaataaaaataaccttaaacgacgacaaaatccgaacg

SEQ ID NO: 48909 - DNA, 50 bp, synthetic construct
  source 1..50: mol_type = other DNA
aacaacaacaaaatccaaacatactatataaaaacaactaatcatacaca

SEQ ID NO: 48910 - DNA, 50 bp, synthetic construct
  source 1..50: mol_type = other DNA
aacgacgacaaaatccgaacgtactatataaaaacgactaatcgtacgcg

SEQ ID NO: 48911 - DNA, 50 bp, synthetic construct
  source 1..50: mol_type = other DNA
aatttcctatatattaaaacctaaactactcactaaccaacaacacacca

SEQ ID NO: 48912 - DNA, 50 bp, synthetic construct
  source 1..50: mol_type = other DNA
aatttcctatatattaaaacctaaactactcgctaaccgacaacgcaccg

SEQ ID NO: 48913 - DNA, 50 bp, synthetic construct
  source 1..50: mol_type = other DNA
aacaactataaccctaactaaaacaaaaaattacttcaacccaaaaaaca

SEQ ID NO: 48914 - DNA, 50 bp, synthetic construct
  source 1..50: mol_type = other DNA
aacgactataaccctaactaaaacaaaaaattacttcaacccgaaaaacg

SEQ ID NO: 48915 - DNA, 50 bp, synthetic construct
  source 1..50: mol_type = other DNA
aataaataacaactataaccctaactaaaacaaaaaattacttcaaccca

SEQ ID NO: 48916 - DNA, 50 bp, synthetic construct
  source 1..50: mol_type = other DNA
aataaataacgactataaccctaactaaaacaaaaaattacttcaacccg

SEQ ID NO: 48917 - DNA, 50 bp, synthetic construct
  source 1..50: mol_type = other DNA
acacaaaatcaaaaattaaaaaccaacctaaccaaaataataaaacccca

SEQ ID NO: 48918 - DNA, 50 bp, synthetic construct
  source 1..50: mol_type = other DNA
acacgaaatcaaaaattaaaaaccaacctaaccaaaataataaaaccccg

SEQ ID NO: 48919 - DNA, 50 bp, synthetic construct
  source 1..50: mol_type = other DNA
ctctaaaaaaaccaaaaaaatcaattatctaaaattctcccacaacaaca

SEQ ID NO: 48920 - DNA, 50 bp, synthetic construct
  source 1..50: mol_type = other DNA
ctctaaaaaaaccaaaaaaatcgattatctaaaattctcccacgacaacg

SEQ ID NO: 48921 - DNA, 50 bp, synthetic construct
  source 1..50: mol_type = other DNA
taccaaaatttctccataacaaatattttaaaacacataaaattaaaaca

SEQ ID NO: 48922 - DNA, 50 bp, synthetic construct
  source 1..50: mol_type = other DNA
taccaaaatttctccataacgaatattttaaaacgcgtaaaattaaaacg

SEQ ID NO: 48923 - DNA, 50 bp, synthetic construct
  source 1..50: mol_type = other DNA
aacacataaaattaaaacaaataaaaaaaacacaaacactatcaactcca

SEQ ID NO: 48924 - DNA, 50 bp, synthetic construct
  source 1..50: mol_type = other DNA
aacgcgtaaaattaaaacgaataaaaaaaacgcaaacgctatcaactccg

SEQ ID NO: 48925 - DNA, 50 bp, synthetic construct
  source 1..50: mol_type = other DNA
taaaatataccccaaacccttcttaattaaaaaaaacacctcaaacccca

SEQ ID NO: 48926 - DNA, 50 bp, synthetic construct
  source 1..50: mol_type = other DNA
taaaatataccccgaacccttcttaattaaaaaaaacgcctcgaaccccg

SEQ ID NO: 48927 - DNA, 50 bp, synthetic construct
  source 1..50: mol_type = other DNA
aaaaaaactccaaacacatctaaaccaatcaaaaaaaaccaaatacaaca

SEQ ID NO: 48928 - DNA, 50 bp, synthetic construct
  source 1..50: mol_type = other DNA
aaaaaaactccgaacgcatctaaaccaatcaaaaaaaaccaaatacgacg

SEQ ID NO: 48929 - DNA, 50 bp, synthetic construct
  source 1..50: mol_type = other DNA
tcaaaaaaactaaaaacaaaattactttctaacaccacccaacaaatcca

SEQ ID NO: 48930 - DNA, 50 bp, synthetic construct
  source 1..50: mol_type = other DNA
tcaaaaaaactaaaaacaaaattactttctaacgccacccaacaaatccg

SEQ ID NO: 48931 - DNA, 50 bp, synthetic construct
  source 1..50: mol_type = other DNA
aataacattaaaaaataactctatttttaatcttcttaaacaaaattaca

SEQ ID NO: 48932 - DNA, 50 bp, synthetic construct
  source 1..50: mol_type = other DNA
aataacgttaaaaaataactctatttttaatcttcttaaacaaaattacg

SEQ ID NO: 48933 - DNA, 50 bp, synthetic construct
  source 1..50: mol_type = other DNA
taacttcaatccccaaattaaaataaaaactatcacctactcaatcctca

SEQ ID NO: 48934 - DNA, 50 bp, synthetic construct
  source 1..50: mol_type = other DNA
taacttcgatccccaaattaaaataaaaactatcgcctactcgatcctcg

SEQ ID NO: 48935 - DNA, 50 bp, synthetic construct
  source 1..50: mol_type = other DNA
aaaaatcaaaaaccaaacaaacaacaactcctatttcaatctaaaaacca

SEQ ID NO: 48936 - DNA, 50 bp, synthetic construct
  source 1..50: mol_type = other DNA
aaaaatcgaaaaccgaacaaacgacaactcctatttcaatctaaaaaccg

SEQ ID NO: 48937 - DNA, 50 bp, synthetic construct
  source 1..50: mol_type = other DNA
acaaccaaaaccattaaaaaacacaaaaactacaaccctaatcaaataca

SEQ ID NO: 48938 - DNA, 50 bp, synthetic construct
  source 1..50: mol_type = other DNA
gcgaccaaaaccattaaaaaacgcgaaaactacaaccctaatcaaatacg

SEQ ID NO: 48939 - DNA, 50 bp, synthetic construct
  source 1..50: mol_type = other DNA
aaaacacaaaattctaatacccaaactcatactaaaaacaaaaaatcaca

SEQ ID NO: 48940 - DNA, 50 bp, synthetic construct
  source 1..50: mol_type = other DNA
gaaacgcgaaattctaatacccgaactcatactaaaaacgaaaaatcgcg

SEQ ID NO: 48941 - DNA, 50 bp, synthetic construct
  source 1..50: mol_type = other DNA
accaactacaaaaaaacaaatccaaaaaaaattaaccaaaattataaaca

SEQ ID NO: 48942 - DNA, 50 bp, synthetic construct
  source 1..50: mol_type = other DNA
accaactacaaaaaaacgaatccgaaaaaaattaaccgaaattataaacg

SEQ ID NO: 48943 - DNA, 50 bp, synthetic construct
  source 1..50: mol_type = other DNA
caaccaatatcaaaataacaactaaaaataaaaaccactccaaacttcca

SEQ ID NO: 48944 - DNA, 50 bp, synthetic construct
  source 1..50: mol_type = other DNA
caaccaatatcgaaataacgactaaaaataaaaaccgctccgaacttccg

SEQ ID NO: 48945 - DNA, 50 bp, synthetic construct
  source 1..50: mol_type = other DNA
ctaaataacaaccaatatcaaaataacaactaaaaataaaaaccactcca

SEQ ID NO: 48946 - DNA, 50 bp, synthetic construct
  source 1..50: mol_type = other DNA
ctaaataacaaccaatatcgaaataacgactaaaaataaaaaccgctccg

SEQ ID NO: 48947 - DNA, 50 bp, synthetic construct
  source 1..50: mol_type = other DNA
tcacaatctaaaaaaaacttaactaaataacaaccaatatcaaaataaca

SEQ ID NO: 48948 - DNA, 50 bp, synthetic construct
  source 1..50: mol_type = other DNA
tcgcaatctaaaaaaaacttaactaaataacaaccaatatcgaaataacg

SEQ ID NO: 48949 - DNA, 50 bp, synthetic construct
  source 1..50: mol_type = other DNA
aatataatttcaactcaacttatcccaccctacaaaaaaacaaaattaca

SEQ ID NO: 48950 - DNA, 50 bp, synthetic construct
  source 1..50: mol_type = other DNA
aatataatttcgactcaacttatcccgccctacgaaaaaacgaaattacg

SEQ ID NO: 48951 - DNA, 50 bp, synthetic construct
  source 1..50: mol_type = other DNA
aaactacaaatataatttcaactcaacttatcccaccctacaaaaaaaca

SEQ ID NO: 48952 - DNA, 50 bp, synthetic construct
  source 1..50: mol_type = other DNA
aaactacaaatataatttcgactcaacttatcccgccctacgaaaaaacg

SEQ ID NO: 48953 - DNA, 50 bp, synthetic construct
  source 1..50: mol_type = other DNA
aatcactaaaactacaaatataatttcaactcaacttatcccaccctaca

SEQ ID NO: 48954 - DNA, 50 bp, synthetic construct
  source 1..50: mol_type = other DNA
aatcgctaaaactacaaatataatttcgactcaacttatcccgccctacg

SEQ ID NO: 48955 - DNA, 50 bp, synthetic construct
  source 1..50: mol_type = other DNA
ttaataaactaacccaaaactaaaacaactaattttcaaaaacccacaca

SEQ ID NO: 48956 - DNA, 50 bp, synthetic construct
  source 1..50: mol_type = other DNA
ttaataaactaacccaaaactaaaacaactaattttcgaaaacccgcgcg

SEQ ID NO: 48957 - DNA, 50 bp, synthetic construct
  source 1..50: mol_type = other DNA
aatcacctaaacctaaaaaatcaaaactacaacaaaccaaaatcacacca

SEQ ID NO: 48958 - DNA, 50 bp, synthetic construct
  source 1..50: mol_type = other DNA
aatcacctaaacctaaaaaatcgaaactacaacgaaccgaaatcgcgccg

SEQ ID NO: 48959 - DNA, 50 bp, synthetic construct
  source 1..50: mol_type = other DNA
aaaaatcacctaaacctaaaaaatcaaaactacaacaaaccaaaatcaca

SEQ ID NO: 48960 - DNA, 50 bp, synthetic construct
  source 1..50: mol_type = other DNA
aaaaatcacctaaacctaaaaaatcgaaactacaacgaaccgaaatcgcg

SEQ ID NO: 48961 - DNA, 50 bp, synthetic construct
  source 1..50: mol_type = other DNA
aacataacaaaaccccatctctacaataaatacaaaaaattatcctaaca

SEQ ID NO: 48962 - DNA, 50 bp, synthetic construct
  source 1..50: mol_type = other DNA
aacataacgaaaccccgtctctacaataaatacaaaaaattatcctaacg

SEQ ID NO: 48963 - DNA, 50 bp, synthetic construct
  source 1..50: mol_type = other DNA
tatacaaaacaacataaaactaaacccacatccaataaaacccaaaaaca

SEQ ID NO: 48964 - DNA, 50 bp, synthetic construct
  source 1..50: mol_type = other DNA
tatacgaaacaacgtaaaactaaacccgcgtccgataaaacccgaaaacg

SEQ ID NO: 48965 - DNA, 50 bp, synthetic construct
  source 1..50: mol_type = other DNA
aaacccaaaaacacaacacaaaaaactaaaaaacaaaatacaaaattaca

SEQ ID NO: 48966 - DNA, 50 bp, synthetic construct
  source 1..50: mol_type = other DNA
aaacccgaaaacgcgacgcgaaaaactaaaaaacaaaatacaaaattacg

SEQ ID NO: 48967 - DNA, 50 bp, synthetic construct
  source 1..50: mol_type = other DNA
aaacactaaacaaacacaaaaatcctttcaaaactataaaaacattctca

SEQ ID NO: 48968 - DNA, 50 bp, synthetic construct
  source 1..50: mol_type = other DNA
aaacgctaaacgaacacgaaaatcctttcgaaactataaaaacattctcg

SEQ ID NO: 48969 - DNA, 50 bp, synthetic construct
  source 1..50: mol_type = other DNA
taaataaatatataacaaaaaaacactaaacaaacacaaaaatcctttca

SEQ ID NO: 48970 - DNA, 50 bp, synthetic construct
  source 1..50: mol_type = other DNA
taaataaatatataacgaaaaaacgctaaacgaacacgaaaatcctttcg

SEQ ID NO: 48971 - DNA, 50 bp, synthetic construct
  source 1..50: mol_type = other DNA
aaaactcaacatttcccaaaaatacccccataacttcaaaaaaatcccca

SEQ ID NO: 48972 - DNA, 50 bp, synthetic construct
  source 1..50: mol_type = other DNA
aaaactcaacgtttcccgaaaatacccccataacttcgaaaaaatccccg

SEQ ID NO: 48973 - DNA, 50 bp, synthetic construct
  source 1..50: mol_type = other DNA
cctccaaacttctaaaaacccacaaaaaacaaataaataaatatataaca

SEQ ID NO: 48974 - DNA, 50 bp, synthetic construct
  source 1..50: mol_type = other DNA
cctccgaacttctaaaaacccgcaaaaaacgaataaataaatatataacg

SEQ ID NO: 48975 - DNA, 50 bp, synthetic construct
  source 1..50: mol_type = other DNA
aaacaaaaaccaatccaactaaacctaataacaaaaaaactacaacccca

SEQ ID NO: 48976 - DNA, 50 bp, synthetic construct
  source 1..50: mol_type = other DNA
aaacgaaaaccgatccaactaaacctaataacgaaaaaactacgaccccg

SEQ ID NO: 48977 - DNA, 50 bp, synthetic construct
  source 1..50: mol_type = other DNA
acacaaaaaacatacaaaaaacaacaccatcttacaccttaaataaacca

SEQ ID NO: 48978 - DNA, 50 bp, synthetic construct
  source 1..50: mol_type = other DNA
acgcaaaaaacgtacaaaaaacaacgccatcttacgccttaaataaaccg

SEQ ID NO: 48979 - DNA, 50 bp, synthetic construct
  source 1..50: mol_type = other DNA
atatctataaacaaaaaacatacccaattcatccaaaacacaaaataaca

SEQ ID NO: 48980 - DNA, 50 bp, synthetic construct
  source 1..50: mol_type = other DNA
atatctataaacgaaaaacgtacccgattcatccaaaacgcaaaataacg

SEQ ID NO: 48981 - DNA, 50 bp, synthetic construct
  source 1..50: mol_type = other DNA
ccaattcatccaaaacacaaaataacactactttttacacattctttaca

SEQ ID NO: 48982 - DNA, 50 bp, synthetic construct
  source 1..50: mol_type = other DNA
ccgattcatccaaaacgcaaaataacgctactttttacacgttctttacg

SEQ ID NO: 48983 - DNA, 50 bp, synthetic construct
  source 1..50: mol_type = other DNA
ccaaaacacaaaataacactactttttacacattctttacacttatacca

SEQ ID NO: 48984 - DNA, 50 bp, synthetic construct
  source 1..50: mol_type = other DNA
ccaaaacgcaaaataacgctactttttacacgttctttacgcttataccg

SEQ ID NO: 48985 - DNA, 50 bp, synthetic construct
  source 1..50: mol_type = other DNA
atcctaatactacaactaataactatataacatctctctaccctacacca

SEQ ID NO: 48986 - DNA, 50 bp, synthetic construct
  source 1..50: mol_type = other DNA
atcctaatactacgactaataactatataacgtctctctaccctacgccg

SEQ ID NO: 48987 - DNA, 50 bp, synthetic construct
  source 1..50: mol_type = other DNA
ccctaaaccaaactaacaatcactacaaacaaaaaaactaaaatcaccca

SEQ ID NO: 48988 - DNA, 50 bp, synthetic construct
  source 1..50: mol_type = other DNA
ccctaaaccgaactaacaatcactacgaacgaaaaaactaaaatcacccg

SEQ ID NO: 48989 - DNA, 50 bp, synthetic construct
  source 1..50: mol_type = other DNA
ctaaaaatcacaaataacaacattttctctttaatattaaaaaacaaaca

SEQ ID NO: 48990 - DNA, 50 bp, synthetic construct
  source 1..50: mol_type = other DNA
ctaaaaatcacgaataacaacattttctctttaatattaaaaaacgaacg

SEQ ID NO: 48991 - DNA, 50 bp, synthetic construct
  source 1..50: mol_type = other DNA
aaaaacaaaaactccaaaaccaacttaaaccttaccaaaacaaaaaacca

SEQ ID NO: 48992 - DNA, 50 bp, synthetic construct
  source 1..50: mol_type = other DNA
aaaaacaaaaactccaaaaccgacttaaaccttaccgaaacgaaaaaccg

SEQ ID NO: 48993 - DNA, 50 bp, synthetic construct
  source 1..50: mol_type = other DNA
ttccctcaaaaaacaaaaactccaaaaccaacttaaaccttaccaaaaca

SEQ ID NO: 48994 - DNA, 50 bp, synthetic construct
  source 1..50: mol_type = other DNA
ttccctcgaaaaacaaaaactccaaaaccgacttaaaccttaccgaaacg

SEQ ID NO: 48995 - DNA, 50 bp, synthetic construct
  source 1..50: mol_type = other DNA
aaaacttccctcaaaaaacaaaaactccaaaaccaacttaaaccttacca

SEQ ID NO: 48996 - DNA, 50 bp, synthetic construct
  source 1..50: mol_type = other DNA
gaaacttccctcgaaaaacaaaaactccaaaaccgacttaaaccttaccg

SEQ ID NO: 48997 - DNA, 50 bp, synthetic construct
  source 1..50: mol_type = other DNA
aaaccaactctaaaacttctattccccaaaaaaaacctcaaataaaaaca

SEQ ID NO: 48998 - DNA, 50 bp, synthetic construct
  source 1..50: mol_type = other DNA
aaaccgactctaaaacttctattccccgaaaaaaacctcgaataaaaacg

SEQ ID NO: 48999 - DNA, 50 bp, synthetic construct
  source 1..50: mol_type = other DNA
acaaactttaaaaccctataacaaaaaccacataaaaaaactctctccca

SEQ ID NO: 49000 - DNA, 50 bp, synthetic construct
  source 1..50: mol_type = other DNA
acgaactttaaaaccctataacgaaaaccgcgtaaaaaaactctctcccg

SEQ ID NO: 49001 - DNA, 50 bp, synthetic construct
  source 1..50: mol_type = other DNA
ccaaatccaaatcaaaaaaataaactaacaaactttaaaaccctataaca

SEQ ID NO: 49002 - DNA, 50 bp, synthetic construct
  source 1..50: mol_type = other DNA
ccaaatccgaatcgaaaaaataaactaacgaactttaaaaccctataacg

SEQ ID NO: 49003 - DNA, 50 bp, synthetic construct
  source 1..50: mol_type = other DNA
aaatactcaaaaaacaataacaaaaaaacataaaaaacctccaaattcca

SEQ ID NO: 49004 - DNA, 50 bp, synthetic construct
  source 1..50: mol_type = other DNA
aaatactcgaaaaacgataacgaaaaaacgtaaaaaacctccgaattccg

SEQ ID NO: 49005 - DNA, 50 bp, synthetic construct
  source 1..50: mol_type = other DNA
aatcccaaaacaacaaaaatcccaaaacaaaataccacaaaaacaaccca

SEQ ID NO: 49006 - DNA, 50 bp, synthetic construct
  source 1..50: mol_type = other DNA
aatcccgaaacaacaaaaatcccgaaacaaaataccgcaaaaacgacccg

SEQ ID NO: 49007 - DNA, 50 bp, synthetic construct
  source 1..50: mol_type = other DNA
taccacaaaaacaacccaccaaaaaactccaaaactaaaaataaatacca

SEQ ID NO: 49008 - DNA, 50 bp, synthetic construct
  source 1..50: mol_type = other DNA
taccgcaaaaacgacccgccaaaaaactccgaaactaaaaataaataccg

SEQ ID NO: 49009 - DNA, 50 bp, synthetic construct
  source 1..50: mol_type = other DNA
tccaaaactaaaaataaataccaaacctcacctaaaacaaaaccaaacca

SEQ ID NO: 49010 - DNA, 50 bp, synthetic construct
  source 1..50: mol_type = other DNA
tccgaaactaaaaataaataccgaacctcacctaaaacaaaaccgaaccg

SEQ ID NO: 49011 - DNA, 50 bp, synthetic construct
  source 1..50: mol_type = other DNA
actaaaaataaataccaaacctcacctaaaacaaaaccaaaccacaaaca

SEQ ID NO: 49012 - DNA, 50 bp, synthetic construct
  source 1..50: mol_type = other DNA
actaaaaataaataccgaacctcacctaaaacaaaaccgaaccgcaaacg

SEQ ID NO: 49013 - DNA, 50 bp, synthetic construct
  source 1..50: mol_type = other DNA
aaaaataaataccaaacctcacctaaaacaaaaccaaaccacaaacaaca

SEQ ID NO: 49014 - DNA, 50 bp, synthetic construct
  source 1..50: mol_type = other DNA
aaaaataaataccgaacctcacctaaaacaaaaccgaaccgcaaacgacg

SEQ ID NO: 49015 - DNA, 50 bp, synthetic construct
  source 1..50: mol_type = other DNA
tactaataccctaaaaacacaaacaaaactctcccaaatccttcctttca

SEQ ID NO: 49016 - DNA, 50 bp, synthetic construct
  source 1..50: mol_type = other DNA
tactaataccctaaaaacgcgaacaaaactctcccaaatccttcctttcg

SEQ ID NO: 49017 - DNA, 50 bp, synthetic construct
  source 1..50: mol_type = other DNA
ttccccaacctcttttataaaacaatctttactaataccctaaaaacaca

SEQ ID NO: 49018 - DNA, 50 bp, synthetic construct
  source 1..50: mol_type = other DNA
ttccccgacctcttttataaaacgatctttactaataccctaaaaacgcg

SEQ ID NO: 49019 - DNA, 50 bp, synthetic construct
  source 1..50: mol_type = other DNA
aacctactaaaaatcacacacaacaccctactaaataaactaattcccca

SEQ ID NO: 49020 - DNA, 50 bp, synthetic construct
  source 1..50: mol_type = other DNA
aacctactaaaaatcacgcgcaacgccctactaaataaactaattccccg

SEQ ID NO: 49021 - DNA, 50 bp, synthetic construct
  source 1..50: mol_type = other DNA
caaaatctccaatactaccacaaaaaaacaatcaaataaatctaatccca

SEQ ID NO: 49022 - DNA, 50 bp, synthetic construct
  source 1..50: mol_type = other DNA
caaaatctccaatactaccgcgaaaaaacaatcgaataaatctaatcccg

SEQ ID NO: 49023 - DNA, 50 bp, synthetic construct
  source 1..50: mol_type = other DNA
aatctaatcccaaaaaaaaacacaaaaaaaacccaatctaaccttacaca

SEQ ID NO: 49024 - DNA, 50 bp, synthetic construct
  source 1..50: mol_type = other DNA
aatctaatcccgaaaaaaaacacaaaaaaaacccaatctaaccttacacg

SEQ ID NO: 49025 - DNA, 50 bp, synthetic construct
  source 1..50: mol_type = other DNA
aatcaaaaactatacaacacaaacatctccttcaccaaaaacaaacacca

SEQ ID NO: 49026 - DNA, 50 bp, synthetic construct
  source 1..50: mol_type = other DNA
aatcaaaaactatacgacgcaaacatctccttcgccaaaaacaaacgccg

SEQ ID NO: 49027 - DNA, 50 bp, synthetic construct
  source 1..50: mol_type = other DNA
aaaaaaaaactcaaccaaaatcaaacctctttccacttatacaaaacaca

SEQ ID NO: 49028 - DNA, 50 bp, synthetic construct
  source 1..50: mol_type = other DNA
aaaaaaaaactcaaccgaaatcaaacctctttccgcttatacgaaacgcg

SEQ ID NO: 49029 - DNA, 50 bp, synthetic construct
  source 1..50: mol_type = other DNA
tatacatacaaataaaaaaactatacaaacactttatcaatcactacaca

SEQ ID NO: 49030 - DNA, 50 bp, synthetic construct
  source 1..50: mol_type = other DNA
tatacatacgaataaaaaaactatacaaacgctttatcgatcgctacgcg

SEQ ID NO: 49031 - DNA, 50 bp, synthetic construct
  source 1..50: mol_type = other DNA
cttatacatacaaataaaaaaactatacaaacactttatcaatcactaca

SEQ ID NO: 49032 - DNA, 50 bp, synthetic construct
  source 1..50: mol_type = other DNA
cttatacatacgaataaaaaaactatacaaacgctttatcgatcgctacg

SEQ ID NO: 49033 - DNA, 50 bp, synthetic construct
  source 1..50: mol_type = other DNA
aaaatcttatacatacaaataaaaaaactatacaaacactttatcaatca

SEQ ID NO: 49034 - DNA, 50 bp, synthetic construct
  source 1..50: mol_type = other DNA
aaaatcttatacatacgaataaaaaaactatacaaacgctttatcgatcg

SEQ ID NO: 49035 - DNA, 50 bp, synthetic construct
  source 1..50: mol_type = other DNA
ctctcaaaaaataaaatcttatacatacaaataaaaaaactatacaaaca

SEQ ID NO: 49036 - DNA, 50 bp, synthetic construct
  source 1..50: mol_type = other DNA
ctctcgaaaaataaaatcttatacatacgaataaaaaaactatacaaacg

SEQ ID NO: 49037 - DNA, 50 bp, synthetic construct
  source 1..50: mol_type = other DNA
aaaatcctttatataacaaaaaaaatacaaacaaatacattaaccttcca

SEQ ID NO: 49038 - DNA, 50 bp, synthetic construct
  source 1..50: mol_type = other DNA
aaaatcctttatataacgaaaaaaatacgaacaaatacgttaaccttccg

SEQ ID NO: 49039 - DNA, 50 bp, synthetic construct
  source 1..50: mol_type = other DNA
aaccccatttttcaaaaattcaatacccctattcaaccaaaaaatcaaca

SEQ ID NO: 49040 - DNA, 50 bp, synthetic construct
  source 1..50: mol_type = other DNA
aaccccatttttcgaaaattcaatacccctattcaaccgaaaaatcaacg

SEQ ID NO: 49041 - DNA, 50 bp, synthetic construct
  source 1..50: mol_type = other DNA
ttcaaaaattcaatacccctattcaaccaaaaaatcaacacacctaccca

SEQ ID NO: 49042 - DNA, 50 bp, synthetic construct
  source 1..50: mol_type = other DNA
ttcgaaaattcaatacccctattcaaccgaaaaatcaacgcacctacccg

SEQ ID NO: 49043 - DNA, 50 bp, synthetic construct
  source 1..50: mol_type = other DNA
attccattttaccaccccataaccttaaaccaaaaaacaataataactca

SEQ ID NO: 49044 - DNA, 50 bp, synthetic construct
  source 1..50: mol_type = other DNA
gttccattttaccgccccataaccttaaaccgaaaaacgataataactcg

SEQ ID NO: 49045 - DNA, 50 bp, synthetic construct
  source 1..50: mol_type = other DNA
ttttctctaaaaactaacattccattttaccaccccataaccttaaacca

SEQ ID NO: 49046 - DNA, 50 bp, synthetic construct
  source 1..50: mol_type = other DNA
ttttctctaaaaactaacgttccattttaccgccccataaccttaaaccg

SEQ ID NO: 49047 - DNA, 50 bp, synthetic construct
  source 1..50: mol_type = other DNA
aaactaccatcattccccaactcaaaatcataaaacaacaaaataaaaca

SEQ ID NO: 49048 - DNA, 50 bp, synthetic construct
  source 1..50: mol_type = other DNA
gaactaccatcgttccccgactcaaaatcataaaacgacaaaataaaacg

SEQ ID NO: 49049 - DNA, 50 bp, synthetic construct
  source 1..50: mol_type = other DNA
taaaacattaactcctaaaaaaaaacacttaccaaaataaaccaccatca

SEQ ID NO: 49050 - DNA, 50 bp, synthetic construct
  source 1..50: mol_type = other DNA
taaaacgttaactcctaaaaaaaaacacttaccaaaataaaccgccgtcg

SEQ ID NO: 49051 - DNA, 50 bp, synthetic construct
  source 1..50: mol_type = other DNA
ataaaccaccatcaaaacaacccacaataaaaactaaactaaaaacaaca

SEQ ID NO: 49052 - DNA, 50 bp, synthetic construct
  source 1..50: mol_type = other DNA
ataaaccgccgtcgaaacgacccgcaataaaaactaaactaaaaacaacg

SEQ ID NO: 49053 - DNA, 50 bp, synthetic construct
  source 1..50: mol_type = other DNA
cacaataaaaactaaactaaaaacaacaacactaaaaaaataaatctcca

SEQ ID NO: 49054 - DNA, 50 bp, synthetic construct
  source 1..50: mol_type = other DNA
cgcaataaaaactaaactaaaaacaacgacgctaaaaaaataaatctccg

SEQ ID NO: 49055 - DNA, 50 bp, synthetic construct
  source 1..50: mol_type = other DNA
actaaactaaaaacaacaacactaaaaaaataaatctccacaaaacccca

SEQ ID NO: 49056 - DNA, 50 bp, synthetic construct
  source 1..50: mol_type = other DNA
actaaactaaaaacaacgacgctaaaaaaataaatctccgcaaaaccccg

SEQ ID NO: 49057 - DNA, 50 bp, synthetic construct
  source 1..50: mol_type = other DNA
taaaaacaacaacactaaaaaaataaatctccacaaaaccccaaaaacca

SEQ ID NO: 49058 - DNA, 50 bp, synthetic construct
  source 1..50: mol_type = other DNA
taaaaacaacgacgctaaaaaaataaatctccgcaaaaccccgaaaaccg

SEQ ID NO: 49059 - DNA, 50 bp, synthetic construct
  source 1..50: mol_type = other DNA
aataaaatctaactctatcacccaaattaaaatacaataacataatctca

SEQ ID NO: 49060 - DNA, 50 bp, synthetic construct
  source 1..50: mol_type = other DNA
aataaaatctaactctatcgcccaaattaaaatacaataacgtaatctcg

SEQ ID NO: 49061 - DNA, 50 bp, synthetic construct
  source 1..50: mol_type = other DNA
tctcaatttaaaaatctacaaactatcatttttaaatcttataattaaca

SEQ ID NO: 49062 - DNA, 50 bp, synthetic construct
  source 1..50: mol_type = other DNA
tctcgatttaaaaatctacaaactatcatttttaaatcttataattaacg

SEQ ID NO: 49063 - DNA, 50 bp, synthetic construct
  source 1..50: mol_type = other DNA
cttaaaaaaaactaaaatttttaaaaccttcccccacttaaaattttcca

SEQ ID NO: 49064 - DNA, 50 bp, synthetic construct
  source 1..50: mol_type = other DNA
cttaaaaaaaactaaaatttttaaaaccttcccccacttaaaattttccg

SEQ ID NO: 49065 - DNA, 50 bp, synthetic construct
  source 1..50: mol_type = other DNA
acacaaaatcaaaaattaaaaaccaacctaaccaatataataaaacccca

SEQ ID NO: 49066 - DNA, 50 bp, synthetic construct
  source 1..50: mol_type = other DNA
acacgaaatcaaaaattaaaaaccaacctaaccaatataataaaaccccg

SEQ ID NO: 49067 - DNA, 50 bp, synthetic construct
  source 1..50: mol_type = other DNA
aaacataaaacacaaaaaatatccatatctttccaaaatcaacacataca

SEQ ID NO: 49068 - DNA, 50 bp, synthetic construct
  source 1..50: mol_type = other DNA
aaacataaaacacaaaaaatatccgtatctttccaaaatcgacacgtacg

SEQ ID NO: 49069 - DNA, 50 bp, synthetic construct
  source 1..50: mol_type = other DNA
ctcttaaaaacacaaaaaattaccaaaactcaaccacttccctaacaaca

SEQ ID NO: 49070 - DNA, 50 bp, synthetic construct
  source 1..50: mol_type = other DNA
ctcttaaaaacacgaaaaattaccaaaactcaaccgcttccctaacaacg

SEQ ID NO: 49071 - DNA, 50 bp, synthetic construct
  source 1..50: mol_type = other DNA
ataaactacaaatactactaaacaactaaaaaaaaaccatacccacacca

SEQ ID NO: 49072 - DNA, 50 bp, synthetic construct
  source 1..50: mol_type = other DNA
gtaaactacaaatactactaaacaactaaaaaaaaaccatacccacgccg

SEQ ID NO: 49073 - DNA, 50 bp, synthetic construct
  source 1..50: mol_type = other DNA
accataaactacaaatactactaaacaactaaaaaaaaaccatacccaca

SEQ ID NO: 49074 - DNA, 50 bp, synthetic construct
  source 1..50: mol_type = other DNA
gccgtaaactacaaatactactaaacaactaaaaaaaaaccatacccacg

SEQ ID NO: 49075 - DNA, 50 bp, synthetic construct
  source 1..50: mol_type = other DNA
aaaaaatcaccaaataaaaccaaaaccacattaaaaactccctaaaaaca

SEQ ID NO: 49076 - DNA, 50 bp, synthetic construct
  source 1..50: mol_type = other DNA
aaaaaatcgccgaataaaaccgaaaccgcgttaaaaactccctaaaaacg

SEQ ID NO: 49077 - DNA, 50 bp, synthetic construct
  source 1..50: mol_type = other DNA
cctcaacaaaatatcacactcacattataaacaaaacaaaaaaacaaaca

SEQ ID NO: 49078 - DNA, 50 bp, synthetic construct
  source 1..50: mol_type = other DNA
cctcgacgaaatatcgcactcacattataaacgaaacaaaaaaacgaacg

SEQ ID NO: 49079 - DNA, 50 bp, synthetic construct
  source 1..50: mol_type = other DNA
aacaaactaataaacaaacctctctaacaacaactactactaaaaaatca

SEQ ID NO: 49080 - DNA, 50 bp, synthetic construct
  source 1..50: mol_type = other DNA
aacgaactaataaacgaacctctctaacgacgactactactaaaaaatcg

SEQ ID NO: 49081 - DNA, 50 bp, synthetic construct
  source 1..50: mol_type = other DNA
aaatatctctaaaaaaccacaccaaaacccaaaaacaaaaactacacaca

SEQ ID NO: 49082 - DNA, 50 bp, synthetic construct
  source 1..50: mol_type = other DNA
aaatatctctaaaaaaccgcgccgaaacccaaaaacaaaaactacgcacg

SEQ ID NO: 49083 - DNA, 50 bp, synthetic construct
  source 1..50: mol_type = other DNA
aaaaaactaaaaaaccccaccctttccataaatatctctaaaaaaccaca

SEQ ID NO: 49084 - DNA, 50 bp, synthetic construct
  source 1..50: mol_type = other DNA
aaaaaactaaaaaaccccgccctttccgtaaatatctctaaaaaaccgcg

SEQ ID NO: 49085 - DNA, 50 bp, synthetic construct
  source 1..50: mol_type = other DNA
caaaaaaactaaaaaaccccaccctttccataaatatctctaaaaaacca

SEQ ID NO: 49086 - DNA, 50 bp, synthetic construct
  source 1..50: mol_type = other DNA
cgaaaaaactaaaaaaccccgccctttccgtaaatatctctaaaaaaccg

SEQ ID NO: 49087 - DNA, 50 bp, synthetic construct
  source 1..50: mol_type = other DNA
tatcttctcacattaaaaaaccattaataacccaactaccctaccataca

SEQ ID NO: 49088 - DNA, 50 bp, synthetic construct
  source 1..50: mol_type = other DNA
tatcttctcgcgttaaaaaaccgttaataacccaactaccctaccatacg

SEQ ID NO: 49089 - DNA, 50 bp, synthetic construct
  source 1..50: mol_type = other DNA
caccatttttctaaaaattaaaaactctatccaaaaacaacaaaaattca

SEQ ID NO: 49090 - DNA, 50 bp, synthetic construct
  source 1..50: mol_type = other DNA
cgccatttttctaaaaattaaaaactctatccaaaaacaacgaaaattcg

SEQ ID NO: 49091 - DNA, 50 bp, synthetic construct
  source 1..50: mol_type = other DNA
aaaaattaaaaactctatccaaaaacaacaaaaattcaaaattcttaaca

SEQ ID NO: 49092 - DNA, 50 bp, synthetic construct
  source 1..50: mol_type = other DNA
aaaaattaaaaactctatccaaaaacaacgaaaattcgaaattcttaacg

SEQ ID NO: 49093 - DNA, 50 bp, synthetic construct
  source 1..50: mol_type = other DNA
aaacaaaatttcaccatattaatcaaatcaatctaaaactcctaacctca

SEQ ID NO: 49094 - DNA, 50 bp, synthetic construct
  source 1..50: mol_type = other DNA
aaacgaaatttcaccatattaatcaaatcgatctaaaactcctaacctcg

SEQ ID NO: 49095 - DNA, 50 bp, synthetic construct
  source 1..50: mol_type = other DNA
acttcaaaatacctaaaaaaacaaatcacaaaatcaaaaattccaaacca

SEQ ID NO: 49096 - DNA, 50 bp, synthetic construct
  source 1..50: mol_type = other DNA
acttcgaaatacctaaaaaaacgaatcacgaaatcaaaaattccaaaccg

SEQ ID NO: 49097 - DNA, 50 bp, synthetic construct
  source 1..50: mol_type = other DNA
aggggaaagatggtgttttaagtttaatatttgtttgttatagggagaat

SEQ ID NO: 49098 - DNA, 50 bp, synthetic construct
  source 1..50: mol_type = other DNA
aggggaaagacggtgttttaagtttaatatttgtttgttatagggagaac

SEQ ID NO: 49099 - DNA, 50 bp, synthetic construct
  source 1..50: mol_type = other DNA
tccacattccctacacaataaatactttctataccactactatctatcca

SEQ ID NO: 49100 - DNA, 50 bp, synthetic construct
  source 1..50: mol_type = other DNA
tccgcgttccctacacaataaatactttctataccgctactatctatccg

SEQ ID NO: 49101 - DNA, 50 bp, synthetic construct
  source 1..50: mol_type = other DNA
aacaacacaaaaaatacttactatacaaaaaacacaaaaccaaaataaca

SEQ ID NO: 49102 - DNA, 50 bp, synthetic construct
  source 1..50: mol_type = other DNA
aacgacacaaaaaatacttactatacaaaaaacgcgaaaccaaaataacg

SEQ ID NO: 49103 - DNA, 50 bp, synthetic construct
  source 1..50: mol_type = other DNA
cttactatacaaaaaacacaaaaccaaaataacaacaaaaaaaccaaaca

SEQ ID NO: 49104 - DNA, 50 bp, synthetic construct
  source 1..50: mol_type = other DNA
cttactatacaaaaaacgcgaaaccaaaataacgacaaaaaaaccgaacg

SEQ ID NO: 49105 - DNA, 50 bp, synthetic construct
  source 1..50: mol_type = other DNA
atacaaaaaacacaaaaccaaaataacaacaaaaaaaccaaacaaaaaca

SEQ ID NO: 49106 - DNA, 50 bp, synthetic construct
  source 1..50: mol_type = other DNA
atacaaaaaacgcgaaaccaaaataacgacaaaaaaaccgaacgaaaacg

SEQ ID NO: 49107 - DNA, 50 bp, synthetic construct
  source 1..50: mol_type = other DNA
acacaaaaccaaaataacaacaaaaaaaccaaacaaaaacataacccaca

SEQ ID NO: 49108 - DNA, 50 bp, synthetic construct
  source 1..50: mol_type = other DNA
acgcgaaaccaaaataacgacaaaaaaaccgaacgaaaacgtaacccacg

SEQ ID NO: 49109 - DNA, 50 bp, synthetic construct
  source 1..50: mol_type = other DNA
acaaaaattacaataaacctttatcaaaccactacactccaatctaaaca

SEQ ID NO: 49110 - DNA, 50 bp, synthetic construct
  source 1..50: mol_type = other DNA
acgaaaattacaataaacctttatcgaaccactacactccaatctaaacg

SEQ ID NO: 49111 - DNA, 50 bp, synthetic construct
  source 1..50: mol_type = other DNA
atcccaactacaacctcaaaaaactaaaataataaaatcccttaaaccca

SEQ ID NO: 49112 - DNA, 50 bp, synthetic construct
  source 1..50: mol_type = other DNA
atcccaactacaacctcgaaaaactaaaataataaaatcccttaaacccg

SEQ ID NO: 49113 - DNA, 50 bp, synthetic construct
  source 1..50: mol_type = other DNA
ctacctctacataatcaaactcacattaaataccccatttacctacaaca

SEQ ID NO: 49114 - DNA, 50 bp, synthetic construct
  source 1..50: mol_type = other DNA
ctacctctacgtaatcaaactcacattaaataccccgtttacctacaacg

SEQ ID NO: 49115 - DNA, 50 bp, synthetic construct
  source 1..50: mol_type = other DNA
catttactctctcaaacccaccccaccacttcataaatataaataaacca

SEQ ID NO: 49116 - DNA, 50 bp, synthetic construct
  source 1..50: mol_type = other DNA
catttactctctcgaacccgccccaccacttcataaatataaataaaccg

SEQ ID NO: 49117 - DNA, 50 bp, synthetic construct
  source 1..50: mol_type = other DNA
ctactctcaatactatcactaactcaactacaataaaaataataaaaaca

SEQ ID NO: 49118 - DNA, 50 bp, synthetic construct
  source 1..50: mol_type = other DNA
ctactctcaatactatcgctaactcaactacgataaaaataataaaaacg

SEQ ID NO: 49119 - DNA, 50 bp, synthetic construct
  source 1..50: mol_type = other DNA
ttaccaaaaactctttccctactctcaatactatcactaactcaactaca

SEQ ID NO: 49120 - DNA, 50 bp, synthetic construct
  source 1..50: mol_type = other DNA
ttaccgaaaactctttccctactctcaatactatcgctaactcaactacg

SEQ ID NO: 49121 - DNA, 50 bp, synthetic construct
  source 1..50: mol_type = other DNA
tttaaacaactcaaacaactcaataaaatcaaacatctccattaaacaca

SEQ ID NO: 49122 - DNA, 50 bp, synthetic construct
  source 1..50: mol_type = other DNA
tttaaacaactcgaacaactcgataaaatcaaacgtctccattaaacgcg

SEQ ID NO: 49123 - DNA, 50 bp, synthetic construct
  source 1..50: mol_type = other DNA
aactcaaacaactcaataaaatcaaacatctccattaaacacaaaactca

SEQ ID NO: 49124 - DNA, 50 bp, synthetic construct
  source 1..50: mol_type = other DNA
aactcgaacaactcgataaaatcaaacgtctccattaaacgcgaaactcg

SEQ ID NO: 49125 - DNA, 50 bp, synthetic construct
  source 1..50: mol_type = other DNA
actcaccacaataaaaattaccacaaaaattaacaaaaacaacacaacca

SEQ ID NO: 49126 - DNA, 50 bp, synthetic construct
  source 1..50: mol_type = other DNA
actcgccacgataaaaattaccacaaaaattaacgaaaacaacacgaccg

SEQ ID NO: 49127 - DNA, 50 bp, synthetic construct
  source 1..50: mol_type = other DNA
caccacaataaaaattaccacaaaaattaacaaaaacaacacaaccaaca

SEQ ID NO: 49128 - DNA, 50 bp, synthetic construct
  source 1..50: mol_type = other DNA
cgccacgataaaaattaccacaaaaattaacgaaaacaacacgaccgacg

SEQ ID NO: 49129 - DNA, 50 bp, synthetic construct
  source 1..50: mol_type = other DNA
taattcccacttaatacacacaaaaactacaaaaaacacaacaatttaca

SEQ ID NO: 49130 - DNA, 50 bp, synthetic construct
  source 1..50: mol_type = other DNA
taattcccacttaatacgcgcgaaaactacgaaaaacgcaacaatttacg

SEQ ID NO: 49131 - DNA, 50 bp, synthetic construct
  source 1..50: mol_type = other DNA
aacaaaaatttcaccatattcaccaaaataatctcaatctcctaacctca

SEQ ID NO: 49132 - DNA, 50 bp, synthetic construct
  source 1..50: mol_type = other DNA
aacgaaaatttcaccgtattcgccaaaataatctcgatctcctaacctcg

SEQ ID NO: 49133 - DNA, 50 bp, synthetic construct
  source 1..50: mol_type = other DNA
acaataaaacccccatctctactaaaaataccaaaaaaattaaccaaaca

SEQ ID NO: 49134 - DNA, 50 bp, synthetic construct
  source 1..50: mol_type = other DNA
acgataaaacccccgtctctactaaaaataccaaaaaaattaaccgaacg

SEQ ID NO: 49135 - DNA, 50 bp, synthetic construct
  source 1..50: mol_type = other DNA
ttatttattctcacttctctaattcttttcattataatattaaaatatca

SEQ ID NO: 49136 - DNA, 50 bp, synthetic construct
  source 1..50: mol_type = other DNA
ttatttattctcgcttctctaattcttttcattataatattaaaatatcg

SEQ ID NO: 49137 - DNA, 50 bp, synthetic construct
  source 1..50: mol_type = other DNA
aaaaaaaaacactacatcaactaaaacactccctctaaaaacaacaaaca

SEQ ID NO: 49138 - DNA, 50 bp, synthetic construct
  source 1..50: mol_type = other DNA
aaaaaaaaacgctacatcgactaaaacgctccctctaaaaacaacgaacg

SEQ ID NO: 49139 - DNA, 50 bp, synthetic construct
  source 1..50: mol_type = other DNA
taaaactaaataaaaaaccaaacaaaaaacaacaaaaccaaccaaaatca

SEQ ID NO: 49140 - DNA, 50 bp, synthetic construct
  source 1..50: mol_type = other DNA
taaaactaaataaaaaaccaaacgaaaaacgacgaaaccgaccgaaatcg

SEQ ID NO: 49141 - DNA, 50 bp, synthetic construct
  source 1..50: mol_type = other DNA
aactaaataaaaaaccaaacaaaaaacaacaaaaccaaccaaaatcaaca

SEQ ID NO: 49142 - DNA, 50 bp, synthetic construct
  source 1..50: mol_type = other DNA
aactaaataaaaaaccaaacgaaaaacgacgaaaccgaccgaaatcgacg

SEQ ID NO: 49143 - DNA, 50 bp, synthetic construct
  source 1..50: mol_type = other DNA
ctaaataaaaaaccaaacaaaaaacaacaaaaccaaccaaaatcaacaca

SEQ ID NO: 49144 - DNA, 50 bp, synthetic construct
  source 1..50: mol_type = other DNA
ctaaataaaaaaccaaacgaaaaacgacgaaaccgaccgaaatcgacgcg

SEQ ID NO: 49145 - DNA, 50 bp, synthetic construct
  source 1..50: mol_type = other DNA
aaacaaaaaaaaccccaacaaaaacaaaataaataccaaaccaaaaatca

SEQ ID NO: 49146 - DNA, 50 bp, synthetic construct
  source 1..50: mol_type = other DNA
gaacaaaaaaaaccccaacaaaaacgaaataaataccgaaccgaaaatcg

SEQ ID NO: 49147 - DNA, 50 bp, synthetic construct
  source 1..50: mol_type = other DNA
aaaaaccccaacaaaaacaaaataaataccaaaccaaaaatcaaacttca

SEQ ID NO: 49148 - DNA, 50 bp, synthetic construct
  source 1..50: mol_type = other DNA
aaaaaccccaacaaaaacgaaataaataccgaaccgaaaatcgaacttcg

SEQ ID NO: 49149 - DNA, 50 bp, synthetic construct
  source 1..50: mol_type = other DNA
aaaaaccaccaacataatataataaaaaaaacttaacaaactaataaaca

SEQ ID NO: 49150 - DNA, 50 bp, synthetic construct
  source 1..50: mol_type = other DNA
gaaaaccgccgacgtaatataataaaaaaaacttaacaaactaataaacg

SEQ ID NO: 49151 - DNA, 50 bp, synthetic construct
  source 1..50: mol_type = other DNA
caataaaacaatacaactactcttaatcctctccaactacttaatctaca

SEQ ID NO: 49152 - DNA, 50 bp, synthetic construct
  source 1..50: mol_type = other DNA
cgataaaacaatacgactactcttaatcctctccgactacttaatctacg

SEQ ID NO: 49153 - DNA, 50 bp, synthetic construct
  source 1..50: mol_type = other DNA
ctcaaaaatcaaaaacaataaaacaatacaactactcttaatcctctcca

SEQ ID NO: 49154 - DNA, 50 bp, synthetic construct
  source 1..50: mol_type = other DNA
ctcgaaaatcgaaaacgataaaacaatacgactactcttaatcctctccg

SEQ ID NO: 49155 - DNA, 50 bp, synthetic construct
  source 1..50: mol_type = other DNA
attaatcccaaaccctaaaactcaaaaatcaaaaacaataaaacaataca

SEQ ID NO: 49156 - DNA, 50 bp, synthetic construct
  source 1..50: mol_type = other DNA
attaatcccgaaccctaaaactcgaaaatcgaaaacgataaaacaatacg

SEQ ID NO: 49157 - DNA, 50 bp, synthetic construct
  source 1..50: mol_type = other DNA
cataaaccaaacaaccaaaaaaaatcaaaaataaccacactatcccacca

SEQ ID NO: 49158 - DNA, 50 bp, synthetic construct
  source 1..50: mol_type = other DNA
cgtaaaccaaacaaccgaaaaaaatcaaaaataaccgcactatcccaccg

SEQ ID NO: 49159 - DNA, 50 bp, synthetic construct
  source 1..50: mol_type = other DNA
aaataaaaataacaatctcaccaacaattaatcccaaaccctaaaactca

SEQ ID NO: 49160 - DNA, 50 bp, synthetic construct
  source 1..50: mol_type = other DNA
aaataaaaataacgatctcgccgacaattaatcccgaaccctaaaactcg

SEQ ID NO: 49161 - DNA, 50 bp, synthetic construct
  source 1..50: mol_type = other DNA
ttaattaataaaaacaaatttcataaaaaataaactactatcattaccca

SEQ ID NO: 49162 - DNA, 50 bp, synthetic construct
  source 1..50: mol_type = other DNA
ttaattaataaaaacgaatttcgtaaaaaataaactactatcgttacccg

SEQ ID NO: 49163 - DNA, 50 bp, synthetic construct
  source 1..50: mol_type = other DNA
ataaacaaaacaatctactaaataaaaatctacacatacacataaaaaca

SEQ ID NO: 49164 - DNA, 50 bp, synthetic construct
  source 1..50: mol_type = other DNA
ataaacaaaacaatctactaaataaaaatctacacgtacgcgtaaaaacg

SEQ ID NO: 49165 - DNA, 50 bp, synthetic construct
  source 1..50: mol_type = other DNA
aaaaatctacacatacacataaaaacaacaatctctacactcctcttcca

SEQ ID NO: 49166 - DNA, 50 bp, synthetic construct
  source 1..50: mol_type = other DNA
aaaaatctacacgtacgcgtaaaaacgacaatctctacactcctcttccg

SEQ ID NO: 49167 - DNA, 50 bp, synthetic construct
  source 1..50: mol_type = other DNA
taaaaaatcattaacttatcaaaacccaccaaaaacccaaaacaccccca

SEQ ID NO: 49168 - DNA, 50 bp, synthetic construct
  source 1..50: mol_type = other DNA
taaaaaatcattaacttatcaaaacccgccaaaaacccaaaacgcccccg

SEQ ID NO: 49169 - DNA, 50 bp, synthetic construct
  source 1..50: mol_type = other DNA
aaaaaaaacacctcaaacaaaaactacataaacaaaaaatatacatcaca

SEQ ID NO: 49170 - DNA, 50 bp, synthetic construct
  source 1..50: mol_type = other DNA
aaaaaaaacgcctcgaacaaaaactacgtaaacgaaaaatatacgtcacg

SEQ ID NO: 49171 - DNA, 50 bp, synthetic construct
  source 1..50: mol_type = other DNA
acacctcaaacaaaaactacataaacaaaaaatatacatcacaaaaaaca

SEQ ID NO: 49172 - DNA, 50 bp, synthetic construct
  source 1..50: mol_type = other DNA
acgcctcgaacaaaaactacgtaaacgaaaaatatacgtcacgaaaaacg

SEQ ID NO: 49173 - DNA, 50 bp, synthetic construct
  source 1..50: mol_type = other DNA
caaattattttaaatcccaaactaccaaccactaaccccaaatttccaca

SEQ ID NO: 49174 - DNA, 50 bp, synthetic construct
  source 1..50: mol_type = other DNA
caaattattttaaatcccgaactaccaaccgctaaccccgaatttccacg

SEQ ID NO: 49175 - DNA, 50 bp, synthetic construct
  source 1..50: mol_type = other DNA
cacaaaacaaaaaaatctcctcactaaaccacattataaaaccaacccca

SEQ ID NO: 49176 - DNA, 50 bp, synthetic construct
  source 1..50: mol_type = other DNA
cacaaaacgaaaaaatctcctcgctaaaccacattataaaaccaaccccg

SEQ ID NO: 49177 - DNA, 50 bp, synthetic construct
  source 1..50: mol_type = other DNA
atccacacttctaaaaaactaaaataaaacataacaaaacataaaaacca

SEQ ID NO: 49178 - DNA, 50 bp, synthetic construct
  source 1..50: mol_type = other DNA
atccgcacttctaaaaaactaaaataaaacataacgaaacgtaaaaaccg

SEQ ID NO: 49179 - DNA, 50 bp, synthetic construct
  source 1..50: mol_type = other DNA
cacctctctatccacacttctaaaaaactaaaataaaacataacaaaaca

SEQ ID NO: 49180 - DNA, 50 bp, synthetic construct
  source 1..50: mol_type = other DNA
cgcctctctatccgcacttctaaaaaactaaaataaaacataacgaaacg

SEQ ID NO: 49181 - DNA, 50 bp, synthetic construct
  source 1..50: mol_type = other DNA
aacaaactaaccacaaataaaatttcccctaatccaaaatctcaacccca

SEQ ID NO: 49182 - DNA, 50 bp, synthetic construct
  source 1..50: mol_type = other DNA
aacgaactaaccacaaataaaatttcccctaatccgaaatctcaaccccg

SEQ ID NO: 49183 - DNA, 50 bp, synthetic construct
  source 1..50: mol_type = other DNA
aattcacattacactcccacccacaactaaaaaaactattaaaaaaaaca

SEQ ID NO: 49184 - DNA, 50 bp, synthetic construct
  source 1..50: mol_type = other DNA
aattcgcattacactcccgcccacgactaaaaaaactattaaaaaaaacg

SEQ ID NO: 49185 - DNA, 50 bp, synthetic construct
  source 1..50: mol_type = other DNA
aaaaaaacaataataaattacaaaaacaaaaactaaactccttcaaaaca

SEQ ID NO: 49186 - DNA, 50 bp, synthetic construct
  source 1..50: mol_type = other DNA
aaaaaaacgataataaattacaaaaacgaaaactaaactccttcaaaacg

SEQ ID NO: 49187 - DNA, 50 bp, synthetic construct
  source 1..50: mol_type = other DNA
tacaaaaacaaaaactaaactccttcaaaacactcctccttccaactcca

SEQ ID NO: 49188 - DNA, 50 bp, synthetic construct
  source 1..50: mol_type = other DNA
tacaaaaacgaaaactaaactccttcaaaacgctcctccttccaactccg

SEQ ID NO: 49189 - DNA, 50 bp, synthetic construct
  source 1..50: mol_type = other DNA
ataacaaaaacaatacccttcctaaaaccatctattaaaaacctcaccca

SEQ ID NO: 49190 - DNA, 50 bp, synthetic construct
  source 1..50: mol_type = other DNA
ataacaaaaacgatacccttcctaaaaccgtctattaaaaacctcgcccg

SEQ ID NO: 49191 - DNA, 50 bp, synthetic construct
  source 1..50: mol_type = other DNA
actaaactctcaaacaaaatccctaataaacaaccccaaaaaaaatatca

SEQ ID NO: 49192 - DNA, 50 bp, synthetic construct
  source 1..50: mol_type = other DNA
actaaactctcgaacgaaatccctaataaacgaccccaaaaaaaatatcg

SEQ ID NO: 49193 - DNA, 50 bp, synthetic construct
  source 1..50: mol_type = other DNA
taacaaaaactaaactatacaacttctcctatacatacatctaactccca

SEQ ID NO: 49194 - DNA, 50 bp, synthetic construct
  source 1..50: mol_type = other DNA
taacgaaaactaaactatacgacttctcctatacgtacatctaactcccg

SEQ ID NO: 49195 - DNA, 50 bp, synthetic construct
  source 1..50: mol_type = other DNA
taaaccaaaaaaaattaacaaaaactaaactatacaacttctcctataca

SEQ ID NO: 49196 - DNA, 50 bp, synthetic construct
  source 1..50: mol_type = other DNA
taaaccgaaaaaaattaacgaaaactaaactatacgacttctcctatacg

SEQ ID NO: 49197 - DNA, 50 bp, synthetic construct
  source 1..50: mol_type = other DNA
atacaaaaatcaaatacacacacaaaaaaaaccacacaacccaaccttca

SEQ ID NO: 49198 - DNA, 50 bp, synthetic construct
  source 1..50: mol_type = other DNA
atacgaaaatcaaatacacgcacaaaaaaaaccgcacaacccaaccttcg

SEQ ID NO: 49199 - DNA, 50 bp, synthetic construct
  source 1..50: mol_type = other DNA
caactacaaaaacacccattacccatactcaaaccttataatactaaaca

SEQ ID NO: 49200 - DNA, 50 bp, synthetic construct
  source 1..50: mol_type = other DNA
caactacgaaaacgcccgttacccatactcaaaccttataatactaaacg

SEQ ID NO: 49201 - DNA, 50 bp, synthetic construct
  source 1..50: mol_type = other DNA
cacaaaacctaaatataaacaacaaacatccccataattatttaaacaca

SEQ ID NO: 49202 - DNA, 50 bp, synthetic construct
  source 1..50: mol_type = other DNA
cacaaaacctaaatataaacaacgaacgtccccgtaattatttaaacgcg

SEQ ID NO: 49203 - DNA, 50 bp, synthetic construct
  source 1..50: mol_type = other DNA
taaacacatatacacatccatacacttctatatctttatatacttataca

SEQ ID NO: 49204 - DNA, 50 bp, synthetic construct
  source 1..50: mol_type = other DNA
taaacgcgtatacacgtccgtacgcttctatatctttatatacttatacg

SEQ ID NO: 49205 - DNA, 50 bp, synthetic construct
  source 1..50: mol_type = other DNA
aaaattcaaaaccaaaacaccaaattaaaaaccaaaataaccaaaaccca

SEQ ID NO: 49206 - DNA, 50 bp, synthetic construct
  source 1..50: mol_type = other DNA
aaaattcaaaaccgaaacgccgaattaaaaaccgaaataaccgaaacccg

SEQ ID NO: 49207 - DNA, 50 bp, synthetic construct
  source 1..50: mol_type = other DNA
ctcaactataaaaaaaaacactctatacataaacaaccaaaaatcaccca

SEQ ID NO: 49208 - DNA, 50 bp, synthetic construct
  source 1..50: mol_type = other DNA
ctcgactataaaaaaaaacgctctatacataaacgaccgaaaatcacccg

SEQ ID NO: 49209 - DNA, 50 bp, synthetic construct
  source 1..50: mol_type = other DNA
caccatattaatcaaactaaactcaaattcctaacctcataatccaccca

SEQ ID NO: 49210 - DNA, 50 bp, synthetic construct
  source 1..50: mol_type = other DNA
caccatattaatcaaactaaactcgaattcctaacctcgtaatccacccg

SEQ ID NO: 49211 - DNA, 50 bp, synthetic construct
  source 1..50: mol_type = other DNA
aaacaaaatttcaccatattaatcaaactaaactcaaattcctaacctca

SEQ ID NO: 49212 - DNA, 50 bp, synthetic construct
  source 1..50: mol_type = other DNA
aaacgaaatttcaccatattaatcaaactaaactcgaattcctaacctcg

SEQ ID NO: 49213 - DNA, 50 bp, synthetic construct
  source 1..50: mol_type = other DNA
aaaaaaattaacacactacaaaacccaatacaactacaactcccccaaca

SEQ ID NO: 49214 - DNA, 50 bp, synthetic construct
  source 1..50: mol_type = other DNA
aaaaaaattaacgcgctacaaaacccgatacaactacaactcccccaacg

SEQ ID NO: 49215 - DNA, 50 bp, synthetic construct
  source 1..50: mol_type = other DNA
actacctcaaacactaaaaaaactacaactataccaaatcctacaacaca

SEQ ID NO: 49216 - DNA, 50 bp, synthetic construct
  source 1..50: mol_type = other DNA
actacctcgaacgctaaaaaaactacaactataccgaatcctacaacgcg

SEQ ID NO: 49217 - DNA, 50 bp, synthetic construct
  source 1..50: mol_type = other DNA
tcaaaaaaaaactactaaacaaatatcctaccccaaaaccccatcccaca

SEQ ID NO: 49218 - DNA, 50 bp, synthetic construct
  source 1..50: mol_type = other DNA
tcgaaaaaaaactactaaacaaatatcctaccccaaaaccccatcccgcg

SEQ ID NO: 49219 - DNA, 50 bp, synthetic construct
  source 1..50: mol_type = other DNA
ctaaacaaatatcctaccccaaaaccccatcccacactaataaaaaatca

SEQ ID NO: 49220 - DNA, 50 bp, synthetic construct
  source 1..50: mol_type = other DNA
ctaaacaaatatcctaccccaaaaccccatcccgcgctaataaaaaatcg

SEQ ID NO: 49221 - DNA, 50 bp, synthetic construct
  source 1..50: mol_type = other DNA
aatacaataatacaatcttaactccctacaacctccacctcttaaactca

SEQ ID NO: 49222 - DNA, 50 bp, synthetic construct
  source 1..50: mol_type = other DNA
aatacaataatacgatcttaactccctacaacctccgcctcttaaactcg

SEQ ID NO: 49223 - DNA, 50 bp, synthetic construct
  source 1..50: mol_type = other DNA
cttcaaaaaactaaaaacaaaaaatacccctatcctaatcaaaccaatca

SEQ ID NO: 49224 - DNA, 50 bp, synthetic construct
  source 1..50: mol_type = other DNA
cttcaaaaaactaaaaacaaaaaatacccctatcctaatcaaaccaatcg

SEQ ID NO: 49225 - DNA, 50 bp, synthetic construct
  source 1..50: mol_type = other DNA
ctcaaacaaataaaaattaaaataaacaaatttaaaccaccaaacaaaca

SEQ ID NO: 49226 - DNA, 50 bp, synthetic construct
  source 1..50: mol_type = other DNA
ctcgaacaaataaaaattaaaataaacgaatttaaaccaccaaacgaacg

SEQ ID NO: 49227 - DNA, 50 bp, synthetic construct
  source 1..50: mol_type = other DNA
caaaaaaataaaaccaattcaacacaaaaaaaattaactcaacaccacca

SEQ ID NO: 49228 - DNA, 50 bp, synthetic construct
  source 1..50: mol_type = other DNA
cgaaaaaataaaaccaattcaacacgaaaaaaattaactcgacgccgccg

SEQ ID NO: 49229 - DNA, 50 bp, synthetic construct
  source 1..50: mol_type = other DNA
acaaaaacctctataaatacataaaaataaattcataaaaaaaactctca

SEQ ID NO: 49230 - DNA, 50 bp, synthetic construct
  source 1..50: mol_type = other DNA
acgaaaacctctataaatacataaaaataaattcgtaaaaaaaactctcg

SEQ ID NO: 49231 - DNA, 50 bp, synthetic construct
  source 1..50: mol_type = other DNA
aaacaacaaaaaaattaccaaaataaaaaattacctccaaaataaataca

SEQ ID NO: 49232 - DNA, 50 bp, synthetic construct
  source 1..50: mol_type = other DNA
aaacaacaaaaaaattaccgaaataaaaaattacctccgaaataaatacg

SEQ ID NO: 49233 - DNA, 50 bp, synthetic construct
  source 1..50: mol_type = other DNA
ccaaacacctaaaaaccccaatatataaaaaaaataatatctaaaaaaca

SEQ ID NO: 49234 - DNA, 50 bp, synthetic construct
  source 1..50: mol_type = other DNA
ccgaacacctaaaaaccccgatatataaaaaaaataatatctaaaaaacg

SEQ ID NO: 49235 - DNA, 50 bp, synthetic construct
  source 1..50: mol_type = other DNA
ctctactacctaactaaatccacacacatacactcatatacaaacctaca

SEQ ID NO: 49236 - DNA, 50 bp, synthetic construct
  source 1..50: mol_type = other DNA
ctctactacctaactaaatccacacacgtacactcatatacaaacctacg

SEQ ID NO: 49237 - DNA, 50 bp, synthetic construct
  source 1..50: mol_type = other DNA
taaaactaaacaaacaaaacaaacaaatactaaaataaactccatcccca

SEQ ID NO: 49238 - DNA, 50 bp, synthetic construct
  source 1..50: mol_type = other DNA
taaaactaaacgaacaaaacgaacgaatactaaaataaactccatccccg

SEQ ID NO: 49239 - DNA, 50 bp, synthetic construct
  source 1..50: mol_type = other DNA
aaactcaaaataaacaaaaacacccaaaaaaacacaccaaaacttatcca

SEQ ID NO: 49240 - DNA, 50 bp, synthetic construct
  source 1..50: mol_type = other DNA
gaactcgaaataaacaaaaacacccgaaaaaacacgccgaaacttatccg

SEQ ID NO: 49241 - DNA, 50 bp, synthetic construct
  source 1..50: mol_type = other DNA
aaccaaaactcaattttctaaaaaaaccctaaaaatacctcctctaccca

SEQ ID NO: 49242 - DNA, 50 bp, synthetic construct
  source 1..50: mol_type = other DNA
aaccgaaactcgattttctaaaaaaaccctaaaaatacctcctctacccg

SEQ ID NO: 49243 - DNA, 50 bp, synthetic construct
  source 1..50: mol_type = other DNA
atccccaccccaaacaaaaaaaacaccttcaaaattcccctaaaaaatca

SEQ ID NO: 49244 - DNA, 50 bp, synthetic construct
  source 1..50: mol_type = other DNA
atccccaccccgaacaaaaaaaacaccttcaaaattcccctaaaaaatcg

SEQ ID NO: 49245 - DNA, 50 bp, synthetic construct
  source 1..50: mol_type = other DNA
aaaatttcaaactccctccaaaaacatccaaaactcaataatctaaacca

SEQ ID NO: 49246 - DNA, 50 bp, synthetic construct
  source 1..50: mol_type = other DNA
aaaatttcaaactccctccgaaaacgtccgaaactcaataatctaaaccg

SEQ ID NO: 49247 - DNA, 50 bp, synthetic construct
  source 1..50: mol_type = other DNA
aaaactcaatatcatactctaaaatttcaaactccctccaaaaacatcca

SEQ ID NO: 49248 - DNA, 50 bp, synthetic construct
  source 1..50: mol_type = other DNA
aaaactcaatatcatactctaaaatttcaaactccctccgaaaacgtccg

SEQ ID NO: 49249 - DNA, 50 bp, synthetic construct
  source 1..50: mol_type = other DNA
caaaaaaaaacaacacaaacccacaacaaaattcaaaattctaaaaaaca

SEQ ID NO: 49250 - DNA, 50 bp, synthetic construct
  source 1..50: mol_type = other DNA
cgaaaaaaaacgacgcgaacccgcgacaaaattcgaaattctaaaaaacg

SEQ ID NO: 49251 - DNA, 50 bp, synthetic construct
  source 1..50: mol_type = other DNA
aaaacaccaataaaacaacacctaaacaaaaccactatatatataaaaca

SEQ ID NO: 49252 - DNA, 50 bp, synthetic construct
  source 1..50: mol_type = other DNA
aaaacgccgataaaacaacgcctaaacaaaaccgctatatatataaaacg

SEQ ID NO: 49253 - DNA, 50 bp, synthetic construct
  source 1..50: mol_type = other DNA
tttaaaaacaatcaaacaaaatcaaaaccaaacaacaaaacacatctaca

SEQ ID NO: 49254 - DNA, 50 bp, synthetic construct
  source 1..50: mol_type = other DNA
tttaaaaacgatcaaacgaaatcaaaaccaaacaacgaaacgcgtctacg

SEQ ID NO: 49255 - DNA, 50 bp, synthetic construct
  source 1..50: mol_type = other DNA
tgttatagaagttagaaaagtggttattttggggaggagttaagatgttt

SEQ ID NO: 49256 - DNA, 50 bp, synthetic construct
  source 1..50: mol_type = other DNA
tgttatagaagttagaaaagtggttattttggggaggagttaagatgttc

SEQ ID NO: 49257 - DNA, 50 bp, synthetic construct
  source 1..50: mol_type = other DNA
aaagtggttattttggggaggagttaagatgtttgaataggaatagtttt

SEQ ID NO: 49258 - DNA, 50 bp, synthetic construct
  source 1..50: mol_type = other DNA
aaagtggttattttggggaggagttaagatgttcgaataggaatagtttc

SEQ ID NO: 49259 - DNA, 50 bp, synthetic construct
  source 1..50: mol_type = other DNA
catacccaaaacttctcaattcccaaacacaccaacactatactaccaca

SEQ ID NO: 49260 - DNA, 50 bp, synthetic construct
  source 1..50: mol_type = other DNA
catacccaaaacttctcaattcccaaacacaccaacactatactaccacg

SEQ ID NO: 49261 - DNA, 50 bp, synthetic construct
  source 1..50: mol_type = other DNA
cttctcaattcccaaacacaccaacactatactaccacattatctttcca

SEQ ID NO: 49262 - DNA, 50 bp, synthetic construct
  source 1..50: mol_type = other DNA
cttctcaattcccaaacacaccaacactatactaccacgttatctttccg

SEQ ID NO: 49263 - DNA, 50 bp, synthetic construct
  source 1..50: mol_type = other DNA
cacttaataaactaataataaattttaacacttaaccatcaataactaca

SEQ ID NO: 49264 - DNA, 50 bp, synthetic construct
  source 1..50: mol_type = other DNA
cacttaataaactaataataaattttaacacttaaccatcaataactacg

SEQ ID NO: 49265 - DNA, 50 bp, synthetic construct
  source 1..50: mol_type = other DNA
tgagttaatagtttttgagatatttaaatgtgtgggttaatagtttttgt

SEQ ID NO: 49266 - DNA, 50 bp, synthetic construct
  source 1..50: mol_type = other DNA
tgagttaatagtttttgagatatttaaatgtgtgggttaatagtttttgc

SEQ ID NO: 49267 - DNA, 50 bp, synthetic construct
  source 1..50: mol_type = other DNA
attttaattgtgatgggaatttattagagggtttaaaggtagggagtgat

SEQ ID NO: 49268 - DNA, 50 bp, synthetic construct
  source 1..50: mol_type = other DNA
attttaattgtgatgggaatttattagagggtttaaaggtagggagtgac

SEQ ID NO: 49269 - DNA, 50 bp, synthetic construct
  source 1..50: mol_type = other DNA
aaacaaaaattaaaactaatttcctaaacctcccaactcccaacctccca

SEQ ID NO: 49270 - DNA, 50 bp, synthetic construct
  source 1..50: mol_type = other DNA
aaacaaaaattaaaactaatttcctaaacctcccaactcccgacctcccg

SEQ ID NO: 49271 - DNA, 50 bp, synthetic construct
  source 1..50: mol_type = other DNA
tcccaataataccacaaaaactaaaacataactataaacaccctacctca

SEQ ID NO: 49272 - DNA, 50 bp, synthetic construct
  source 1..50: mol_type = other DNA
tcccgataataccgcaaaaactaaaacataactataaacaccctacctcg

SEQ ID NO: 49273 - DNA, 50 bp, synthetic construct
  source 1..50: mol_type = other DNA
aaaactaaaccacaacttaaccctacccctaccatataaaaaataaccca

SEQ ID NO: 49274 - DNA, 50 bp, synthetic construct
  source 1..50: mol_type = other DNA
aaaactaaaccacaacttaaccctacccctaccatataaaaaataacccg

SEQ ID NO: 49275 - DNA, 50 bp, synthetic construct
  source 1..50: mol_type = other DNA
cacaaaaaatcttcaataaatacttactaataacattaataaaataaaca

SEQ ID NO: 49276 - DNA, 50 bp, synthetic construct
  source 1..50: mol_type = other DNA
cacaaaaaatcttcaataaatacttactaataacattaataaaataaacg

SEQ ID NO: 49277 - DNA, 50 bp, synthetic construct
  source 1..50: mol_type = other DNA
cacaacataaaaaaactaataaacaacaaaaaacaaaactcaacccaaca

SEQ ID NO: 49278 - DNA, 50 bp, synthetic construct
  source 1..50: mol_type = other DNA
cacaacgtaaaaaaactaataaacgacaaaaaacaaaactcaacccaacg

SEQ ID NO: 49279 - DNA, 50 bp, synthetic construct
  source 1..50: mol_type = other DNA
atacttttcaactaatctcaataaaaatactaacaactaaaaaaaaccca

SEQ ID NO: 49280 - DNA, 50 bp, synthetic construct
  source 1..50: mol_type = other DNA
atacttttcaactaatctcaataaaaatactaacgactaaaaaaaacccg

SEQ ID NO: 49281 - DNA, 50 bp, synthetic construct
  source 1..50: mol_type = other DNA
aatactaattctaatacccaacacacaaaaaaaactcaaaaatattaaca

SEQ ID NO: 49282 - DNA, 50 bp, synthetic construct
  source 1..50: mol_type = other DNA
aatactaattctaatacccaacacacaaaaaaaactcaaaaatattaacg

SEQ ID NO: 49283 - DNA, 50 bp, synthetic construct
  source 1..50: mol_type = other DNA
aacaaattattttaattcaaaacaccttaaaaaaaatacctaacctctca

SEQ ID NO: 49284 - DNA, 50 bp, synthetic construct
  source 1..50: mol_type = other DNA
aacaaattattttaattcaaaacaccttaaaaaaaatacctaacctctcg

SEQ ID NO: 49285 - DNA, 50 bp, synthetic construct
  source 1..50: mol_type = other DNA
aaacccactaaaataaaactaaaaccccaaaaaaaattcaaaaaccccca

SEQ ID NO: 49286 - DNA, 50 bp, synthetic construct
  source 1..50: mol_type = other DNA
aaacccactaaaataaaactaaaaccccaaaaaaaattcaaaaacccccg

SEQ ID NO: 49287 - DNA, 50 bp, synthetic construct
  source 1..50: mol_type = other DNA
tagatagaattttttggaattggtttaattttgttgtgatttgaataaat

SEQ ID NO: 49288 - DNA, 50 bp, synthetic construct
  source 1..50: mol_type = other DNA
tagatagaattttttggaatcggtttaattttgttgtgatttgaataaac

SEQ ID NO: 49289 - DNA, 50 bp, synthetic construct
  source 1..50: mol_type = other DNA
ttaaataaggaataggagaatttggggaatttagaataggatttgggatt

SEQ ID NO: 49290 - DNA, 50 bp, synthetic construct
  source 1..50: mol_type = other DNA
ttaaataaggaataggagaatttggggaatttagaataggatttgggatc

SEQ ID NO: 49291 - DNA, 50 bp, synthetic construct
  source 1..50: mol_type = other DNA
gtttggtatatataaggtgtttagtagatatttattaaatgaaaaatgat

SEQ ID NO: 49292 - DNA, 50 bp, synthetic construct
  source 1..50: mol_type = other DNA
gtttggtatatataaggtgtttagtagatatttattaaatgaaaaacgac

SEQ ID NO: 49293 - DNA, 50 bp, synthetic construct
  source 1..50: mol_type = other DNA
agtgtttggtatatataaggtgtttagtagatatttattaaatgaaaaat

SEQ ID NO: 49294 - DNA, 50 bp, synthetic construct
  source 1..50: mol_type = other DNA
agtgtttggtatatataaggtgtttagtagatatttattaaatgaaaaac

SEQ ID NO: 49295 - DNA, 50 bp, synthetic construct
  source 1..50: mol_type = other DNA
aaatctccaacatcacctcctctaaaaaaccttccctaatcacttctcca

SEQ ID NO: 49296 - DNA, 50 bp, synthetic construct
  source 1..50: mol_type = other DNA
aaatctccaacatcacctcctctaaaaaaccttccctaatcacttctccg

SEQ ID NO: 49297 - DNA, 50 bp, synthetic construct
  source 1..50: mol_type = other DNA
gagaatattaatatatagataaaagttagtaagattggagtaagggaaat

SEQ ID NO: 49298 - DNA, 50 bp, synthetic construct
  source 1..50: mol_type = other DNA
gagaatattaatatatagataaaagttagtaagattggagtaagggaaac

SEQ ID NO: 49299 - DNA, 50 bp, synthetic construct
  source 1..50: mol_type = other DNA
caaataactaaaaaacaaatcaatattcatatcatctctcacctaaccca

SEQ ID NO: 49300 - DNA, 50 bp, synthetic construct
  source 1..50: mol_type = other DNA
caaataactaaaaaacaaatcaatattcatatcatctctcacctaacccg

SEQ ID NO: 49301 - DNA, 50 bp, synthetic construct
  source 1..50: mol_type = other DNA
tattgatttgttttttagttatttgagagagatgagattttaggggttat

SEQ ID NO: 49302 - DNA, 50 bp, synthetic construct
  source 1..50: mol_type = other DNA
tattgatttgttttttagttatttgagagagatgagattttaggggttac

SEQ ID NO: 49303 - DNA, 50 bp, synthetic construct
  source 1..50: mol_type = other DNA
ctacaaaattctaacctaacaaaattaacttctcaaaatcccccaaccca

SEQ ID NO: 49304 - DNA, 50 bp, synthetic construct
  source 1..50: mol_type = other DNA
ctacaaaattctaacctaacaaaattaacttctcaaaatcccccaacccg

SEQ ID NO: 49305 - DNA, 50 bp, synthetic construct
  source 1..50: mol_type = other DNA
aaatatcaaaaaccaataacatactaaaaatattatacttaaaaataaca

SEQ ID NO: 49306 - DNA, 50 bp, synthetic construct
  source 1..50: mol_type = other DNA
aaatatcaaaaaccgataacatactaaaaatattatacttaaaaataacg

SEQ ID NO: 49307 - DNA, 50 bp, synthetic construct
  source 1..50: mol_type = other DNA
ataaatcataaaattaaaaaacaaccaaataataaccacattcaactaca

SEQ ID NO: 49308 - DNA, 50 bp, synthetic construct
  source 1..50: mol_type = other DNA
ataaatcataaaattaaaaaacaaccaaataataaccacattcaactacg

SEQ ID NO: 49309 - DNA, 50 bp, synthetic construct
  source 1..50: mol_type = other DNA
tccttcctctaaaattccaaacattcccatctccaaacatcactatatca

SEQ ID NO: 49310 - DNA, 50 bp, synthetic construct
  source 1..50: mol_type = other DNA
tccttcctctaaaattccaaacattcccgtctccaaacatcactatatcg

SEQ ID NO: 49311 - DNA, 50 bp, synthetic construct
  source 1..50: mol_type = other DNA
accctccttacaccctctaatatcccaataaaatataaccaaacaaacca

SEQ ID NO: 49312 - DNA, 50 bp, synthetic construct
  source 1..50: mol_type = other DNA
accctccttacgccctctaatatcccaataaaatataaccgaacaaaccg

SEQ ID NO: 49313 - DNA, 50 bp, synthetic construct
  source 1..50: mol_type = other DNA
tacaacacttctcctcatcaacaataaactccaaaaactttaaatctaca

SEQ ID NO: 49314 - DNA, 50 bp, synthetic construct
  source 1..50: mol_type = other DNA
tacgacacttctcctcgtcaacgataaactccaaaaactttaaatctacg

SEQ ID NO: 49315 - DNA, 50 bp, synthetic construct
  source 1..50: mol_type = other DNA
cctcaactctaaaaaaaccaacataaacccaaaactcctaaaactcacca

SEQ ID NO: 49316 - DNA, 50 bp, synthetic construct
  source 1..50: mol_type = other DNA
cctcaactctaaaaaaaccgacgtaaacccaaaactcctaaaactcaccg

SEQ ID NO: 49317 - DNA, 50 bp, synthetic construct
  source 1..50: mol_type = other DNA
aatacataaactaccaatactacctacaaatactacaacacttctcctca

SEQ ID NO: 49318 - DNA, 50 bp, synthetic construct
  source 1..50: mol_type = other DNA
aatacataaactaccgatactacctacgaatactacgacacttctcctcg

SEQ ID NO: 49319 - DNA, 50 bp, synthetic construct
  source 1..50: mol_type = other DNA
aacataaacccaaaactcctaaaactcaccactaacaaaaaaaaatacca

SEQ ID NO: 49320 - DNA, 50 bp, synthetic construct
  source 1..50: mol_type = other DNA
gacgtaaacccaaaactcctaaaactcaccgctaacgaaaaaaaataccg

SEQ ID NO: 49321 - DNA, 50 bp, synthetic construct
  source 1..50: mol_type = other DNA
acaacataacaaaacctcatctctactaaaaaaatacaaacaattaacca

SEQ ID NO: 49322 - DNA, 50 bp, synthetic construct
  source 1..50: mol_type = other DNA
acaacgtaacgaaacctcatctctactaaaaaaatacaaacaattaaccg

SEQ ID NO: 49323 - DNA, 50 bp, synthetic construct
  source 1..50: mol_type = other DNA
caatcaaaacaaaactcctataccctatcaataacacaaaaaactaaaca

SEQ ID NO: 49324 - DNA, 50 bp, synthetic construct
  source 1..50: mol_type = other DNA
cgatcaaaacgaaactcctataccctatcgataacgcaaaaaactaaacg

SEQ ID NO: 49325 - DNA, 50 bp, synthetic construct
  source 1..50: mol_type = other DNA
tctaaactacaaacccaacaatacctattaccaacacaaacctctaccca

SEQ ID NO: 49326 - DNA, 50 bp, synthetic construct
  source 1..50: mol_type = other DNA
tctaaactacaaacccgacaatacctattaccaacacaaacctctacccg

SEQ ID NO: 49327 - DNA, 50 bp, synthetic construct
  source 1..50: mol_type = other DNA
tttatatttttaataaaaaaaaaatttcactatattaaccaaactaaaca

SEQ ID NO: 49328 - DNA, 50 bp, synthetic construct
  source 1..50: mol_type = other DNA
tttatatttttaataaaaaaaaaatttcactatattaaccaaactaaacg

SEQ ID NO: 49329 - DNA, 50 bp, synthetic construct
  source 1..50: mol_type = other DNA
acaaaaattacaataaaccaaaactacaccattacaatccaacctaaaca

SEQ ID NO: 49330 - DNA, 50 bp, synthetic construct
  source 1..50: mol_type = other DNA
acgaaaattacaataaaccaaaactacgccattacaatccaacctaaacg

SEQ ID NO: 49331 - DNA, 50 bp, synthetic construct
  source 1..50: mol_type = other DNA
accctttaaaaataatttcaaaaacaaactcacaaaaacataccaattca

SEQ ID NO: 49332 - DNA, 50 bp, synthetic construct
  source 1..50: mol_type = other DNA
accctttaaaaataatttcgaaaacgaactcacgaaaacgtaccgattcg

SEQ ID NO: 49333 - DNA, 50 bp, synthetic construct
  source 1..50: mol_type = other DNA
aaccaatccttacctttaaaatcacaataaacttcccaaactccaatcca

SEQ ID NO: 49334 - DNA, 50 bp, synthetic construct
  source 1..50: mol_type = other DNA
aaccaatccttacctttaaaatcgcaataaacttcccgaactccaatccg

SEQ ID NO: 49335 - DNA, 50 bp, synthetic construct
  source 1..50: mol_type = other DNA
atccacaacctaaaccaatccttacctttaaaatcacaataaacttccca

SEQ ID NO: 49336 - DNA, 50 bp, synthetic construct
  source 1..50: mol_type = other DNA
atccacgacctaaaccaatccttacctttaaaatcgcaataaacttcccg

SEQ ID NO: 49337 - DNA, 50 bp, synthetic construct
  source 1..50: mol_type = other DNA
aaccattaaactatccccaaacccatatactcaacattaataactactca

SEQ ID NO: 49338 - DNA, 50 bp, synthetic construct
  source 1..50: mol_type = other DNA
aaccattaaactatccccaaacccgtatactcaacgttaataactactcg

SEQ ID NO: 49339 - DNA, 50 bp, synthetic construct
  source 1..50: mol_type = other DNA
aaactctaacaccccctaataactataaaacaatcaaaaactaaaaaaca

SEQ ID NO: 49340 - DNA, 50 bp, synthetic construct
  source 1..50: mol_type = other DNA
aaactctaacgccccctaataactataaaacgatcgaaaactaaaaaacg

SEQ ID NO: 49341 - DNA, 50 bp, synthetic construct
  source 1..50: mol_type = other DNA
ctaaaaataataacacacaataacaaccacttaataacaaccactttaca

SEQ ID NO: 49342 - DNA, 50 bp, synthetic construct
  source 1..50: mol_type = other DNA
ctaaaaataataacgcgcgataacaaccacttaataacaaccgctttacg

SEQ ID NO: 49343 - DNA, 50 bp, synthetic construct
  source 1..50: mol_type = other DNA
tcaaaacctaatacctaaaactacaaccaaatcccaaccccaaaaactca

SEQ ID NO: 49344 - DNA, 50 bp, synthetic construct
  source 1..50: mol_type = other DNA
tcaaaacctaatacctaaaactacgaccaaatcccgaccccaaaaactcg

SEQ ID NO: 49345 - DNA, 50 bp, synthetic construct
  source 1..50: mol_type = other DNA
cattaatcccaaatcacaaataaaaacaactaaaataactaaattataca

SEQ ID NO: 49346 - DNA, 50 bp, synthetic construct
  source 1..50: mol_type = other DNA
cgttaatcccgaatcacgaataaaaacgactaaaataactaaattatacg

SEQ ID NO: 49347 - DNA, 50 bp, synthetic construct
  source 1..50: mol_type = other DNA
ttacacccaaactccccaattctaatcttaaccaaaaacaacaacaacca

SEQ ID NO: 49348 - DNA, 50 bp, synthetic construct
  source 1..50: mol_type = other DNA
ttacacccaaactccccaattctaatcttaaccaaaaacaacgacgaccg

SEQ ID NO: 49349 - DNA, 50 bp, synthetic construct
  source 1..50: mol_type = other DNA
tctccttaaatcccaataacctaccaaataaaaaaaaccataactaacca

SEQ ID NO: 49350 - DNA, 50 bp, synthetic construct
  source 1..50: mol_type = other DNA
tctccttaaatcccaataacctaccgaataaaaaaaaccgtaactaaccg

SEQ ID NO: 49351 - DNA, 50 bp, synthetic construct
  source 1..50: mol_type = other DNA
aataacctaccaaataaaaaaaaccataactaaccaacctcccaataaca

SEQ ID NO: 49352 - DNA, 50 bp, synthetic construct
  source 1..50: mol_type = other DNA
aataacctaccgaataaaaaaaaccgtaactaaccgacctcccaataacg

SEQ ID NO: 49353 - DNA, 50 bp, synthetic construct
  source 1..50: mol_type = other DNA
tcaccatacccaaatttaaaaataccactaccacaaacacaacaaaatca

SEQ ID NO: 49354 - DNA, 50 bp, synthetic construct
  source 1..50: mol_type = other DNA
tcaccgtacccaaatttaaaaataccgctaccacgaacacaacgaaatcg

SEQ ID NO: 49355 - DNA, 50 bp, synthetic construct
  source 1..50: mol_type = other DNA
acttcttacccacatccccaccaaaatccaattttttattttaacactca

SEQ ID NO: 49356 - DNA, 50 bp, synthetic construct
  source 1..50: mol_type = other DNA
gcttcttacccacatccccgccaaaatccaattttttattttaacgctcg

SEQ ID NO: 49357 - DNA, 50 bp, synthetic construct
  source 1..50: mol_type = other DNA
aaacaccaaaacaaaaaactaaactctaacaaaaatataaacaaaaaaca

SEQ ID NO: 49358 - DNA, 50 bp, synthetic construct
  source 1..50: mol_type = other DNA
gaacgccaaaacaaaaaactaaactctaacgaaaatataaacaaaaaacg

SEQ ID NO: 49359 - DNA, 50 bp, synthetic construct
  source 1..50: mol_type = other DNA
aaacaaaaaactaaactctaacaaaaatataaacaaaaaacaactaaaca

SEQ ID NO: 49360 - DNA, 50 bp, synthetic construct
  source 1..50: mol_type = other DNA
aaacaaaaaactaaactctaacgaaaatataaacaaaaaacgactaaacg

SEQ ID NO: 49361 - DNA, 50 bp, synthetic construct
  source 1..50: mol_type = other DNA
atctcaactccccataaaaccataaaaaaaatataaataacccaaaaaca

SEQ ID NO: 49362 - DNA, 50 bp, synthetic construct
  source 1..50: mol_type = other DNA
gtctcaactccccataaaaccgtaaaaaaaatataaataacccgaaaacg

SEQ ID NO: 49363 - DNA, 50 bp, synthetic construct
  source 1..50: mol_type = other DNA
aaaaaaaatacatctttctccaaaaaaccctctccaaccactaacttcca

SEQ ID NO: 49364 - DNA, 50 bp, synthetic construct
  source 1..50: mol_type = other DNA
aaaaaaaatacatctttctccaaaaaaccctctccgaccgctaacttccg

SEQ ID NO: 49365 - DNA, 50 bp, synthetic construct
  source 1..50: mol_type = other DNA
ccccaattctaaaaaaaatacatctttctccaaaaaaccctctccaacca

SEQ ID NO: 49366 - DNA, 50 bp, synthetic construct
  source 1..50: mol_type = other DNA
ccccaattctaaaaaaaatacatctttctccaaaaaaccctctccgaccg

SEQ ID NO: 49367 - DNA, 50 bp, synthetic construct
  source 1..50: mol_type = other DNA
aaacccaaatcaaaaacctaaaaccataacaaatcaaatcaacataatca

SEQ ID NO: 49368 - DNA, 50 bp, synthetic construct
  source 1..50: mol_type = other DNA
aaacccaaatcgaaaacctaaaaccgtaacgaatcgaatcaacataatcg

SEQ ID NO: 49369 - DNA, 50 bp, synthetic construct
  source 1..50: mol_type = other DNA
taaactccctccctaaaacaataataaaaaccataatcactattacacca

SEQ ID NO: 49370 - DNA, 50 bp, synthetic construct
  source 1..50: mol_type = other DNA
taaactccctccctaaaacgataataaaaaccgtaatcgctattacaccg

SEQ ID NO: 49371 - DNA, 50 bp, synthetic construct
  source 1..50: mol_type = other DNA
acaaaacctaaaacaaacaaaatcaaaaaacctaacctccaaaaaacaca

SEQ ID NO: 49372 - DNA, 50 bp, synthetic construct
  source 1..50: mol_type = other DNA
acgaaacctaaaacgaacaaaatcgaaaaacctaacctccaaaaaacgcg

SEQ ID NO: 49373 - DNA, 50 bp, synthetic construct
  source 1..50: mol_type = other DNA
tacctcaacacctaaaaacaaaaccaaataaaaaaacaaaacctaaaaca

SEQ ID NO: 49374 - DNA, 50 bp, synthetic construct
  source 1..50: mol_type = other DNA
tacctcaacgcctaaaaacgaaaccaaataaaaaaacgaaacctaaaacg

SEQ ID NO: 49375 - DNA, 50 bp, synthetic construct
  source 1..50: mol_type = other DNA
aacacctaataacctaccaacattaaataaataaaactaaaatcacccca

SEQ ID NO: 49376 - DNA, 50 bp, synthetic construct
  source 1..50: mol_type = other DNA
aacacctaataacctaccgacgttaaataaataaaactaaaatcgccccg

SEQ ID NO: 49377 - DNA, 50 bp, synthetic construct
  source 1..50: mol_type = other DNA
ttctatcttcaaactataaaacacaaaatcaaataaacacataataaaca

SEQ ID NO: 49378 - DNA, 50 bp, synthetic construct
  source 1..50: mol_type = other DNA
ttctatcttcaaactataaaacgcgaaatcgaataaacacgtaataaacg

SEQ ID NO: 49379 - DNA, 50 bp, synthetic construct
  source 1..50: mol_type = other DNA
tcaaactataaaacacaaaatcaaataaacacataataaacataacttca

SEQ ID NO: 49380 - DNA, 50 bp, synthetic construct
  source 1..50: mol_type = other DNA
tcaaactataaaacgcgaaatcgaataaacacgtaataaacgtaacttcg

SEQ ID NO: 49381 - DNA, 50 bp, synthetic construct
  source 1..50: mol_type = other DNA
aaacacaaaatcaaataaacacataataaacataacttcacaaaacctca

SEQ ID NO: 49382 - DNA, 50 bp, synthetic construct
  source 1..50: mol_type = other DNA
aaacgcgaaatcgaataaacacgtaataaacgtaacttcgcaaaacctcg

SEQ ID NO: 49383 - DNA, 50 bp, synthetic construct
  source 1..50: mol_type = other DNA
tcaaataaacacataataaacataacttcacaaaacctcacctttttcca

SEQ ID NO: 49384 - DNA, 50 bp, synthetic construct
  source 1..50: mol_type = other DNA
tcgaataaacacgtaataaacgtaacttcgcaaaacctcgcctttttccg

SEQ ID NO: 49385 - DNA, 50 bp, synthetic construct
  source 1..50: mol_type = other DNA
caactatcaaacactaacaacaaaaataataaaacactaaccattttcca

SEQ ID NO: 49386 - DNA, 50 bp, synthetic construct
  source 1..50: mol_type = other DNA
caactatcaaacgctaacgacgaaaataataaaacgctaaccattttccg

SEQ ID NO: 49387 - DNA, 50 bp, synthetic construct
  source 1..50: mol_type = other DNA
atattaaaaaactatcatctccccaacaaaaaactacaaatcaaatctca

SEQ ID NO: 49388 - DNA, 50 bp, synthetic construct
  source 1..50: mol_type = other DNA
atattaaaaaactatcatctccccgacgaaaaactacgaatcaaatctcg

SEQ ID NO: 49389 - DNA, 50 bp, synthetic construct
  source 1..50: mol_type = other DNA
aaaacaactctaaaaactcctcaaaacctaccctcataaaaaaaaaacca

SEQ ID NO: 49390 - DNA, 50 bp, synthetic construct
  source 1..50: mol_type = other DNA
aaaacaactctaaaaactcctcgaaacctaccctcgtaaaaaaaaaaccg

SEQ ID NO: 49391 - DNA, 50 bp, synthetic construct
  source 1..50: mol_type = other DNA
taacacttaattaccaaatttcctaaaaaaacaatccccaaaaacccaca

SEQ ID NO: 49392 - DNA, 50 bp, synthetic construct
  source 1..50: mol_type = other DNA
taacacttaattaccaaatttcctaaaaaaacgatccccaaaaacccgcg

SEQ ID NO: 49393 - DNA, 50 bp, synthetic construct
  source 1..50: mol_type = other DNA
caaaaacccacaaacattcaacatctttaacaaaacaaaacaaaaaacca

SEQ ID NO: 49394 - DNA, 50 bp, synthetic construct
  source 1..50: mol_type = other DNA
caaaaacccgcgaacgttcaacatctttaacgaaacaaaacaaaaaaccg

SEQ ID NO: 49395 - DNA, 50 bp, synthetic construct
  source 1..50: mol_type = other DNA
caacatctttaacaaaacaaaacaaaaaaccactaccatctaacaaacca

SEQ ID NO: 49396 - DNA, 50 bp, synthetic construct
  source 1..50: mol_type = other DNA
caacatctttaacgaaacaaaacaaaaaaccgctaccgtctaacaaaccg

SEQ ID NO: 49397 - DNA, 50 bp, synthetic construct
  source 1..50: mol_type = other DNA
acaacattcaaattaccaaacacaaaaatacccacaaaaaacaaaaaaca

SEQ ID NO: 49398 - DNA, 50 bp, synthetic construct
  source 1..50: mol_type = other DNA
acaacattcaaattaccaaacgcaaaaatacccacgaaaaacaaaaaacg

SEQ ID NO: 49399 - DNA, 50 bp, synthetic construct
  source 1..50: mol_type = other DNA
cctactaccctttcacaacattcaaattaccaaacacaaaaatacccaca

SEQ ID NO: 49400 - DNA, 50 bp, synthetic construct
  source 1..50: mol_type = other DNA
cctactaccctttcacaacattcaaattaccaaacgcaaaaatacccacg

SEQ ID NO: 49401 - DNA, 50 bp, synthetic construct
  source 1..50: mol_type = other DNA
aataataaaaatccataccaaataaaactcaaaaaaacataaaattccca

SEQ ID NO: 49402 - DNA, 50 bp, synthetic construct
  source 1..50: mol_type = other DNA
aataataaaaatccgtaccgaataaaactcaaaaaaacataaaattcccg

SEQ ID NO: 49403 - DNA, 50 bp, synthetic construct
  source 1..50: mol_type = other DNA
aacctctaacataaaacacccataccaccaaataactataacaaacccca

SEQ ID NO: 49404 - DNA, 50 bp, synthetic construct
  source 1..50: mol_type = other DNA
aacctctaacataaaacacccataccaccaaataactataacgaaccccg

SEQ ID NO: 49405 - DNA, 50 bp, synthetic construct
  source 1..50: mol_type = other DNA
ttgtttttaaagggggtggaaatagttggttatttgattttatatgtttt

SEQ ID NO: 49406 - DNA, 50 bp, synthetic construct
  source 1..50: mol_type = other DNA
ttgtttttaaagggggcggaaatagtcggttatttgattttatacgtttc

SEQ ID NO: 49407 - DNA, 50 bp, synthetic construct
  source 1..50: mol_type = other DNA
ttttgttgtttttaaagggggtggaaatagttggttatttgattttatat

SEQ ID NO: 49408 - DNA, 50 bp, synthetic construct
  source 1..50: mol_type = other DNA
ttttgttgtttttaaagggggcggaaatagtcggttatttgattttatac

SEQ ID NO: 49409 - DNA, 50 bp, synthetic construct
  source 1..50: mol_type = other DNA
tataaacactactataccttctttaaacctaaaccaccaacttaacaaca

SEQ ID NO: 49410 - DNA, 50 bp, synthetic construct
  source 1..50: mol_type = other DNA
tataaacactactataccttctttaaacctaaaccgccgacttaacgacg

SEQ ID NO: 49411 - DNA, 50 bp, synthetic construct
  source 1..50: mol_type = other DNA
ttacatacccttaataaactctaacaacactcccaaaattaaaaacacca

SEQ ID NO: 49412 - DNA, 50 bp, synthetic construct
  source 1..50: mol_type = other DNA
ttacgtacccttaataaactctaacgacactcccgaaattaaaaacaccg

SEQ ID NO: 49413 - DNA, 50 bp, synthetic construct
  source 1..50: mol_type = other DNA
taaaacactaccaaaaaccacataaaaccccacaatttcaaaaaaattca

SEQ ID NO: 49414 - DNA, 50 bp, synthetic construct
  source 1..50: mol_type = other DNA
taaaacgctaccgaaaaccacataaaaccccacgatttcaaaaaaattcg

SEQ ID NO: 49415 - DNA, 50 bp, synthetic construct
  source 1..50: mol_type = other DNA
ccaaaaaccacataaaaccccacaatttcaaaaaaattcaaaaaccccca

SEQ ID NO: 49416 - DNA, 50 bp, synthetic construct
  source 1..50: mol_type = other DNA
ccgaaaaccacataaaaccccacgatttcaaaaaaattcgaaaacccccg

SEQ ID NO: 49417 - DNA, 50 bp, synthetic construct
  source 1..50: mol_type = other DNA
aaaaccacataaaaccccacaatttcaaaaaaattcaaaaacccccacca

SEQ ID NO: 49418 - DNA, 50 bp, synthetic construct
  source 1..50: mol_type = other DNA
aaaaccacataaaaccccacgatttcaaaaaaattcgaaaacccccgccg

SEQ ID NO: 49419 - DNA, 50 bp, synthetic construct
  source 1..50: mol_type = other DNA
aaacaaaataaaaacaaataaaccttaacccccacacccctctacattca

SEQ ID NO: 49420 - DNA, 50 bp, synthetic construct
  source 1..50: mol_type = other DNA
aaacgaaataaaaacaaataaaccttaacccccgcacccctctacgttcg

SEQ ID NO: 49421 - DNA, 50 bp, synthetic construct
  source 1..50: mol_type = other DNA
caaaaaacaaaataaaaacaaataaaccttaacccccacacccctctaca

SEQ ID NO: 49422 - DNA, 50 bp, synthetic construct
  source 1..50: mol_type = other DNA
cgaaaaacgaaataaaaacaaataaaccttaacccccgcacccctctacg

SEQ ID NO: 49423 - DNA, 50 bp, synthetic construct
  source 1..50: mol_type = other DNA
caattaaaaaaataaacaccaaactcctccaaaatcatcaaaatctatca

SEQ ID NO: 49424 - DNA, 50 bp, synthetic construct
  source 1..50: mol_type = other DNA
cgattaaaaaaataaacaccgaactcctccgaaatcatcaaaatctatcg

SEQ ID NO: 49425 - DNA, 50 bp, synthetic construct
  source 1..50: mol_type = other DNA
ataaacacaaccaaaatcctctaaaattatcaaacctatccaacctccca

SEQ ID NO: 49426 - DNA, 50 bp, synthetic construct
  source 1..50: mol_type = other DNA
ataaacgcaaccgaaatcctctaaaattatcaaacctatccaacctcccg

SEQ ID NO: 49427 - DNA, 50 bp, synthetic construct
  source 1..50: mol_type = other DNA
acaccaaaacaccaaataaaaacaaaaatacaaataaaaactctttacca

SEQ ID NO: 49428 - DNA, 50 bp, synthetic construct
  source 1..50: mol_type = other DNA
gcgccgaaacgccgaataaaaacgaaaatacgaataaaaactctttaccg

SEQ ID NO: 49429 - DNA, 50 bp, synthetic construct
  source 1..50: mol_type = other DNA
aacaaaaatacaaataaaaactctttaccaaaaatcaaaaaaatcaaaca

SEQ ID NO: 49430 - DNA, 50 bp, synthetic construct
  source 1..50: mol_type = other DNA
aacgaaaatacgaataaaaactctttaccgaaaatcgaaaaaatcaaacg

SEQ ID NO: 49431 - DNA, 50 bp, synthetic construct
  source 1..50: mol_type = other DNA
aaataaaaactctttaccaaaaatcaaaaaaatcaaacaaaaacaaaaca

SEQ ID NO: 49432 - DNA, 50 bp, synthetic construct
  source 1..50: mol_type = other DNA
gaataaaaactctttaccgaaaatcgaaaaaatcaaacgaaaacaaaacg

SEQ ID NO: 49433 - DNA, 50 bp, synthetic construct
  source 1..50: mol_type = other DNA
ttaccaaaaatcaaaaaaatcaaacaaaaacaaaacataaaataacccca

SEQ ID NO: 49434 - DNA, 50 bp, synthetic construct
  source 1..50: mol_type = other DNA
ttaccgaaaatcgaaaaaatcaaacgaaaacaaaacgtaaaataaccccg

SEQ ID NO: 49435 - DNA, 50 bp, synthetic construct
  source 1..50: mol_type = other DNA
aaaatcaaaaaaatcaaacaaaaacaaaacataaaataaccccaaaacca

SEQ ID NO: 49436 - DNA, 50 bp, synthetic construct
  source 1..50: mol_type = other DNA
aaaatcgaaaaaatcaaacgaaaacaaaacgtaaaataaccccgaaaccg

SEQ ID NO: 49437 - DNA, 50 bp, synthetic construct
  source 1..50: mol_type = other DNA
aatcaaacaaaaacaaaacataaaataaccccaaaaccaaaaaaaacaca

SEQ ID NO: 49438 - DNA, 50 bp, synthetic construct
  source 1..50: mol_type = other DNA
aatcaaacgaaaacaaaacgtaaaataaccccgaaaccgaaaaaaacacg

SEQ ID NO: 49439 - DNA, 50 bp, synthetic construct
  source 1..50: mol_type = other DNA
aaaacaaaacataaaataaccccaaaaccaaaaaaaacacataaaaaaca

SEQ ID NO: 49440 - DNA, 50 bp, synthetic construct
  source 1..50: mol_type = other DNA
aaaacaaaacgtaaaataaccccgaaaccgaaaaaaacacgtaaaaaacg

SEQ ID NO: 49441 - DNA, 50 bp, synthetic construct
  source 1..50: mol_type = other DNA
caaaacataaaataaccccaaaaccaaaaaaaacacataaaaaacaaaca

SEQ ID NO: 49442 - DNA, 50 bp, synthetic construct
  source 1..50: mol_type = other DNA
caaaacgtaaaataaccccgaaaccgaaaaaaacacgtaaaaaacgaacg

SEQ ID NO: 49443 - DNA, 50 bp, synthetic construct
  source 1..50: mol_type = other DNA
cataaaataaccccaaaaccaaaaaaaacacataaaaaacaaacaacaca

SEQ ID NO: 49444 - DNA, 50 bp, synthetic construct
  source 1..50: mol_type = other DNA
cgtaaaataaccccgaaaccgaaaaaaacacgtaaaaaacgaacgacgcg

SEQ ID NO: 49445 - DNA, 50 bp, synthetic construct
  source 1..50: mol_type = other DNA
aataaccccaaaaaattactccactccaaccccaacaaaacaaaacaaca

SEQ ID NO: 49446 - DNA, 50 bp, synthetic construct
  source 1..50: mol_type = other DNA
aataaccccgaaaaattactccactccaaccccgacaaaacaaaacaacg

SEQ ID NO: 49447 - DNA, 50 bp, synthetic construct
  source 1..50: mol_type = other DNA
tctaaaaacatttaatttatacctaacacatctccctctcaaaataatca

SEQ ID NO: 49448 - DNA, 50 bp, synthetic construct
  source 1..50: mol_type = other DNA
tctaaaaacatttaatttatacctaacgcgtctccctctcgaaataatcg

SEQ ID NO: 49449 - DNA, 50 bp, synthetic construct
  source 1..50: mol_type = other DNA
aaataatcaaaatccctctctttcccatccacctttaaaaaaccttccca

SEQ ID NO: 49450 - DNA, 50 bp, synthetic construct
  source 1..50: mol_type = other DNA
aaataatcgaaatccctctctttcccatccgcctttaaaaaaccttcccg

SEQ ID NO: 49451 - DNA, 50 bp, synthetic construct
  source 1..50: mol_type = other DNA
aaaaacccacaacaaaaactattacccaaaaaaacacaaaaaaataatca

SEQ ID NO: 49452 - DNA, 50 bp, synthetic construct
  source 1..50: mol_type = other DNA
aaaaacccgcgacgaaaactattacccaaaaaaacacgaaaaaataatcg

SEQ ID NO: 49453 - DNA, 50 bp, synthetic construct
  source 1..50: mol_type = other DNA
atcactaattattatccaattaaaactcacaaaacactcacctatcccca

SEQ ID NO: 49454 - DNA, 50 bp, synthetic construct
  source 1..50: mol_type = other DNA
atcactaattattatccgattaaaactcgcgaaacactcgcctatccccg

SEQ ID NO: 49455 - DNA, 50 bp, synthetic construct
  source 1..50: mol_type = other DNA
ctccaatcaaataacaaccaataacacactcataaaacaaacactaacca

SEQ ID NO: 49456 - DNA, 50 bp, synthetic construct
  source 1..50: mol_type = other DNA
ctccaatcgaataacaaccaataacacactcataaaacaaacgctaaccg

SEQ ID NO: 49457 - DNA, 50 bp, synthetic construct
  source 1..50: mol_type = other DNA
atcaaataacaaccaataacacactcataaaacaaacactaaccaacaca

SEQ ID NO: 49458 - DNA, 50 bp, synthetic construct
  source 1..50: mol_type = other DNA
atcgaataacaaccaataacacactcataaaacaaacgctaaccgacgcg

SEQ ID NO: 49459 - DNA, 50 bp, synthetic construct
  source 1..50: mol_type = other DNA
acccactactcttccaaacacaattttaaaaaaatcaaaacaaaaaaaca

SEQ ID NO: 49460 - DNA, 50 bp, synthetic construct
  source 1..50: mol_type = other DNA
acccactactcttccgaacgcaattttaaaaaaatcgaaacgaaaaaacg

SEQ ID NO: 49461 - DNA, 50 bp, synthetic construct
  source 1..50: mol_type = other DNA
tcacaactatacaaaaacctacaactcaacctaaatataacaccccaaca

SEQ ID NO: 49462 - DNA, 50 bp, synthetic construct
  source 1..50: mol_type = other DNA
tcgcgactatacgaaaacctacaactcaacctaaatataacaccccaacg

SEQ ID NO: 49463 - DNA, 50 bp, synthetic construct
  source 1..50: mol_type = other DNA
acactaaaataccacacttaaactaaactacaaattttcacacaatcaca

SEQ ID NO: 49464 - DNA, 50 bp, synthetic construct
  source 1..50: mol_type = other DNA
acgctaaaataccacacttaaactaaactacaaattttcgcacaatcgcg

SEQ ID NO: 49465 - DNA, 50 bp, synthetic construct
  source 1..50: mol_type = other DNA
caaattttcacacaatcacaaattaacctctacttactccaaaaacctca

SEQ ID NO: 49466 - DNA, 50 bp, synthetic construct
  source 1..50: mol_type = other DNA
caaattttcgcacaatcgcgaattaacctctacttactccaaaaacctcg

SEQ ID NO: 49467 - DNA, 50 bp, synthetic construct
  source 1..50: mol_type = other DNA
aacaaataactcaaacaattcaaaaacctcacaaaaccaaaaatcccaca

SEQ ID NO: 49468 - DNA, 50 bp, synthetic construct
  source 1..50: mol_type = other DNA
aacaaataactcgaacaattcgaaaacctcgcgaaaccaaaaatcccgcg

SEQ ID NO: 49469 - DNA, 50 bp, synthetic construct
  source 1..50: mol_type = other DNA
ataacaaataactcaaacaattcaaaaacctcacaaaaccaaaaatccca

SEQ ID NO: 49470 - DNA, 50 bp, synthetic construct
  source 1..50: mol_type = other DNA
ataacaaataactcgaacaattcgaaaacctcgcgaaaccaaaaatcccg

SEQ ID NO: 49471 - DNA, 50 bp, synthetic construct
  source 1..50: mol_type = other DNA
acaccatctaacctcccaaaatactaacattatatatataacccacaaca

SEQ ID NO: 49472 - DNA, 50 bp, synthetic construct
  source 1..50: mol_type = other DNA
acaccatctaacctcccgaaatactaacattatatatataacccgcgacg

SEQ ID NO: 49473 - DNA, 50 bp, synthetic construct
  source 1..50: mol_type = other DNA
ttagatattatttggttttttgaagtgttggtattatgtgtgtgatttgt

SEQ ID NO: 49474 - DNA, 50 bp, synthetic construct
  source 1..50: mol_type = other DNA
ttagatattatttggtttttcgaagtgttggtattatgtgtgtgattcgc

SEQ ID NO: 49475 - DNA, 50 bp, synthetic construct
  source 1..50: mol_type = other DNA
tccaaacaccatctaacctcccaaaatactaacattatatatataaccca

SEQ ID NO: 49476 - DNA, 50 bp, synthetic construct
  source 1..50: mol_type = other DNA
tccaaacaccatctaacctcccgaaatactaacattatatatataacccg

SEQ ID NO: 49477 - DNA, 50 bp, synthetic construct
  source 1..50: mol_type = other DNA
aaaccttaacaaacacaaatcttaacatccaaacaccatctaacctccca

SEQ ID NO: 49478 - DNA, 50 bp, synthetic construct
  source 1..50: mol_type = other DNA
aaaccttaacgaacacaaatcttaacatccaaacaccatctaacctcccg

SEQ ID NO: 49479 - DNA, 50 bp, synthetic construct
  source 1..50: mol_type = other DNA
aatctcacttttaaatttacaaccaatctcttcacctaaaacatcaacca

SEQ ID NO: 49480 - DNA, 50 bp, synthetic construct
  source 1..50: mol_type = other DNA
aatctcgcttttaaatttacgaccgatctcttcacctaaaacatcaaccg

SEQ ID NO: 49481 - DNA, 50 bp, synthetic construct
  source 1..50: mol_type = other DNA
aaaaacacacattaaaaactcaaccaaaacaaactacattcacaaaacca

SEQ ID NO: 49482 - DNA, 50 bp, synthetic construct
  source 1..50: mol_type = other DNA
aaaaacacacattaaaaactcaaccaaaacgaactacgttcgcgaaaccg

SEQ ID NO: 49483 - DNA, 50 bp, synthetic construct
  source 1..50: mol_type = other DNA
ataaaacacacaactaatacaaacaaaacaaataacactaaataccccca

SEQ ID NO: 49484 - DNA, 50 bp, synthetic construct
  source 1..50: mol_type = other DNA
ataaaacgcgcaactaatacaaacgaaacgaataacgctaaatacccccg

SEQ ID NO: 49485 - DNA, 50 bp, synthetic construct
  source 1..50: mol_type = other DNA
tacctctaccattcctcaaaataaaacacacaactaatacaaacaaaaca

SEQ ID NO: 49486 - DNA, 50 bp, synthetic construct
  source 1..50: mol_type = other DNA
tacctctaccattcctcgaaataaaacgcgcaactaatacaaacgaaacg

SEQ ID NO: 49487 - DNA, 50 bp, synthetic construct
  source 1..50: mol_type = other DNA
aaaactacctctaccattcctcaaaataaaacacacaactaatacaaaca

SEQ ID NO: 49488 - DNA, 50 bp, synthetic construct
  source 1..50: mol_type = other DNA
gaaactacctctaccattcctcgaaataaaacgcgcaactaatacaaacg

SEQ ID NO: 49489 - DNA, 50 bp, synthetic construct
  source 1..50: mol_type = other DNA
aaacaaaccaaaaacaaaactacctctaccattcctcaaaataaaacaca

SEQ ID NO: 49490 - DNA, 50 bp, synthetic construct
  source 1..50: mol_type = other DNA
aaacgaaccgaaaacgaaactacctctaccattcctcgaaataaaacgcg

SEQ ID NO: 49491 - DNA, 50 bp, synthetic construct
  source 1..50: mol_type = other DNA
acaaaaccttcctaaaaacctacaaaaaactcaaaccaaaaaacaaaaca

SEQ ID NO: 49492 - DNA, 50 bp, synthetic construct
  source 1..50: mol_type = other DNA
gcgaaaccttcctaaaaacctacgaaaaactcgaaccgaaaaacaaaacg

SEQ ID NO: 49493 - DNA, 50 bp, synthetic construct
  source 1..50: mol_type = other DNA
aaaaccccaaaaattaaccctaaaaaacaaaccaaaactaaacaaaaaca

SEQ ID NO: 49494 - DNA, 50 bp, synthetic construct
  source 1..50: mol_type = other DNA
gaaaccccgaaaattaaccctaaaaaacaaaccgaaactaaacgaaaacg

SEQ ID NO: 49495 - DNA, 50 bp, synthetic construct
  source 1..50: mol_type = other DNA
aaaaataaaaaccctacaaaaacccaaaaacaaaaaccataaaaaaaaca

SEQ ID NO: 49496 - DNA, 50 bp, synthetic construct
  source 1..50: mol_type = other DNA
aaaaataaaaaccctacgaaaacccgaaaacaaaaaccataaaaaaaacg

SEQ ID NO: 49497 - DNA, 50 bp, synthetic construct
  source 1..50: mol_type = other DNA
aatcaaaacaaaaaacaatcatctccccaaacttactcaaaacactccca

SEQ ID NO: 49498 - DNA, 50 bp, synthetic construct
  source 1..50: mol_type = other DNA
aatcaaaacgaaaaacaatcatctccccaaacttactcgaaacactcccg

SEQ ID NO: 49499 - DNA, 50 bp, synthetic construct
  source 1..50: mol_type = other DNA
aacccaaaactcaacttacataacacacataaacactcttaaacaaaaca

SEQ ID NO: 49500 - DNA, 50 bp, synthetic construct
  source 1..50: mol_type = other DNA
aacccgaaactcgacttacataacacacgtaaacgctcttaaacgaaacg

SEQ ID NO: 49501 - DNA, 50 bp, synthetic construct
  source 1..50: mol_type = other DNA
aacctcctaaccaaaaacccaaaactcaacttacataacacacataaaca

SEQ ID NO: 49502 - DNA, 50 bp, synthetic construct
  source 1..50: mol_type = other DNA
aacctcctaaccaaaaacccgaaactcgacttacataacacacgtaaacg

SEQ ID NO: 49503 - DNA, 50 bp, synthetic construct
  source 1..50: mol_type = other DNA
ctttataacctcctaaccaaaaacccaaaactcaacttacataacacaca

SEQ ID NO: 49504 - DNA, 50 bp, synthetic construct
  source 1..50: mol_type = other DNA
ctttataacctcctaaccaaaaacccgaaactcgacttacataacacacg

SEQ ID NO: 49505 - DNA, 50 bp, synthetic construct
  source 1..50: mol_type = other DNA
aattttggtagaaatttagtgtgagaatagtttttatttagttttttatt

SEQ ID NO: 49506 - DNA, 50 bp, synthetic construct
  source 1..50: mol_type = other DNA
aattttggtagaaatttagtgtgagaatagtttttatttagttttttatc

SEQ ID NO: 49507 - DNA, 50 bp, synthetic construct
  source 1..50: mol_type = other DNA
tcctatatacaacatatcttaaaaaaacccaaacaaacacctacaaatca

SEQ ID NO: 49508 - DNA, 50 bp, synthetic construct
  source 1..50: mol_type = other DNA
tcctatatacgacgtatcttaaaaaaacccaaacgaacgcctacaaatcg

SEQ ID NO: 49509 - DNA, 50 bp, synthetic construct
  source 1..50: mol_type = other DNA
taaaaaaacccaaacaaacacctacaaatcaaatacacaattcaaaaaca

SEQ ID NO: 49510 - DNA, 50 bp, synthetic construct
  source 1..50: mol_type = other DNA
taaaaaaacccaaacgaacgcctacaaatcgaatacgcgattcgaaaacg

SEQ ID NO: 49511 - DNA, 50 bp, synthetic construct
  source 1..50: mol_type = other DNA
acacaattcaaaaacaactcaaaaaccccaacaaaaaacaacaaaaaaca

SEQ ID NO: 49512 - DNA, 50 bp, synthetic construct
  source 1..50: mol_type = other DNA
acgcgattcgaaaacgactcgaaaaccccaacgaaaaacaacaaaaaacg

SEQ ID NO: 49513 - DNA, 50 bp, synthetic construct
  source 1..50: mol_type = other DNA
aaaacaactcaaaaaccccaacaaaaaacaacaaaaaacacataaaacca

SEQ ID NO: 49514 - DNA, 50 bp, synthetic construct
  source 1..50: mol_type = other DNA
aaaacgactcgaaaaccccaacgaaaaacaacaaaaaacgcgtaaaaccg

SEQ ID NO: 49515 - DNA, 50 bp, synthetic construct
  source 1..50: mol_type = other DNA
acaaaaaacaacaaaaaacacataaaaccataaaatcacaaaactaaaca

SEQ ID NO: 49516 - DNA, 50 bp, synthetic construct
  source 1..50: mol_type = other DNA
acgaaaaacaacaaaaaacgcgtaaaaccgtaaaatcacgaaactaaacg

SEQ ID NO: 49517 - DNA, 50 bp, synthetic construct
  source 1..50: mol_type = other DNA
aaaaaacacataaaaccataaaatcacaaaactaaacaacaaaaaaaaca

SEQ ID NO: 49518 - DNA, 50 bp, synthetic construct
  source 1..50: mol_type = other DNA
aaaaaacgcgtaaaaccgtaaaatcacgaaactaaacgacaaaaaaaacg

SEQ ID NO: 49519 - DNA, 50 bp, synthetic construct
  source 1..50: mol_type = other DNA
cataaaatcacaaaactaaacaacaaaaaaaacaacctaaaactcccaca

SEQ ID NO: 49520 - DNA, 50 bp, synthetic construct
  source 1..50: mol_type = other DNA
cgtaaaatcacgaaactaaacgacaaaaaaaacgacctaaaactcccgcg

SEQ ID NO: 49521 - DNA, 50 bp, synthetic construct
  source 1..50: mol_type = other DNA
taccccaaaaacctacctccccaactaaaaataaaactaaaaaacaacca

SEQ ID NO: 49522 - DNA, 50 bp, synthetic construct
  source 1..50: mol_type = other DNA
taccccaaaaacctacctccccaactaaaaataaaactaaaaaacgaccg

SEQ ID NO: 49523 - DNA, 50 bp, synthetic construct
  source 1..50: mol_type = other DNA
tccacctctcccaactataaaaaccccactaaatatatcaaaaaaaaaca

SEQ ID NO: 49524 - DNA, 50 bp, synthetic construct
  source 1..50: mol_type = other DNA
tccgcctctcccgactataaaaaccccactaaatatatcgaaaaaaaacg

SEQ ID NO: 49525 - DNA, 50 bp, synthetic construct
  source 1..50: mol_type = other DNA
ctccctactttttaaaactaaaaccaaaaaaaacaccacaaaacaacaca

SEQ ID NO: 49526 - DNA, 50 bp, synthetic construct
  source 1..50: mol_type = other DNA
ctccctactttttaaaactaaaaccgaaaaaaacgccacaaaacaacgcg

SEQ ID NO: 49527 - DNA, 50 bp, synthetic construct
  source 1..50: mol_type = other DNA
ttctaaaaataacatttaaaaatttctaaaaccaaacacaataaaataca

SEQ ID NO: 49528 - DNA, 50 bp, synthetic construct
  source 1..50: mol_type = other DNA
ttctaaaaataacatttaaaaatttctaaaaccaaacacgataaaatacg

SEQ ID NO: 49529 - DNA, 50 bp, synthetic construct
  source 1..50: mol_type = other DNA
aacaaacaataactccacaacttccctaaactttttaaccaaacttaaca

SEQ ID NO: 49530 - DNA, 50 bp, synthetic construct
  source 1..50: mol_type = other DNA
aacgaacaataactccgcgacttccctaaactttttaaccaaacttaacg

SEQ ID NO: 49531 - DNA, 50 bp, synthetic construct
  source 1..50: mol_type = other DNA
catacacacttaacacttctcctcaaacaaaacaaaaacaaaactaaaca

SEQ ID NO: 49532 - DNA, 50 bp, synthetic construct
  source 1..50: mol_type = other DNA
catacgcacttaacgcttctcctcaaacgaaacaaaaacgaaactaaacg

SEQ ID NO: 49533 - DNA, 50 bp, synthetic construct
  source 1..50: mol_type = other DNA
aaataaaaaaacaaaaccacattacaaacaaaaaaataaactcctacaca

SEQ ID NO: 49534 - DNA, 50 bp, synthetic construct
  source 1..50: mol_type = other DNA
aaataaaaaaacgaaaccacgttacgaacgaaaaaataaactcctacgcg

SEQ ID NO: 49535 - DNA, 50 bp, synthetic construct
  source 1..50: mol_type = other DNA
ctaaataaaaaaacaaaaccacattacaaacaaaaaaataaactcctaca

SEQ ID NO: 49536 - DNA, 50 bp, synthetic construct
  source 1..50: mol_type = other DNA
ctaaataaaaaaacgaaaccacgttacgaacgaaaaaataaactcctacg

SEQ ID NO: 49537 - DNA, 50 bp, synthetic construct
  source 1..50: mol_type = other DNA
cctctcaccctaaacaaataaaaacctcctaaaatatccacataaacaca

SEQ ID NO: 49538 - DNA, 50 bp, synthetic construct
  source 1..50: mol_type = other DNA
cctctcaccctaaacaaataaaaacctcctaaaatatccacgtaaacgcg

SEQ ID NO: 49539 - DNA, 50 bp, synthetic construct
  source 1..50: mol_type = other DNA
taaaaaacaccccaaatcaacaatcacataactaaaaaaacaaactcaca

SEQ ID NO: 49540 - DNA, 50 bp, synthetic construct
  source 1..50: mol_type = other DNA
taaaaaacgccccgaatcaacgatcacgtaactaaaaaaacgaactcacg

SEQ ID NO: 49541 - DNA, 50 bp, synthetic construct
  source 1..50: mol_type = other DNA
aaataaccatatccaaaaaaaaaacacccttaatatacaaaccactacca

SEQ ID NO: 49542 - DNA, 50 bp, synthetic construct
  source 1..50: mol_type = other DNA
aaataaccgtatccaaaaaaaaaacgcccttaatatacaaaccgctaccg

SEQ ID NO: 49543 - DNA, 50 bp, synthetic construct
  source 1..50: mol_type = other DNA
tataaaaaataaccatatccaaaaaaaaaacacccttaatatacaaacca

SEQ ID NO: 49544 - DNA, 50 bp, synthetic construct
  source 1..50: mol_type = other DNA
tataaaaaataaccgtatccaaaaaaaaaacgcccttaatatacaaaccg

SEQ ID NO: 49545 - DNA, 50 bp, synthetic construct
  source 1..50: mol_type = other DNA
ccctaaatacaatcactttctacaaaataaccaaaacaaaaaacatcaca

SEQ ID NO: 49546 - DNA, 50 bp, synthetic construct
  source 1..50: mol_type = other DNA
ccctaaatacgatcactttctacaaaataaccgaaacgaaaaacgtcgcg

SEQ ID NO: 49547 - DNA, 50 bp, synthetic construct
  source 1..50: mol_type = other DNA
ctaaatacaatcactttctacaaaataaccaaaacaaaaaacatcacaca

SEQ ID NO: 49548 - DNA, 50 bp, synthetic construct
  source 1..50: mol_type = other DNA
ctaaatacgatcactttctacaaaataaccgaaacgaaaaacgtcgcgcg

SEQ ID NO: 49549 - DNA, 50 bp, synthetic construct
  source 1..50: mol_type = other DNA
atcactttctacaaaataaccaaaacaaaaaacatcacacacaaatacca

SEQ ID NO: 49550 - DNA, 50 bp, synthetic construct
  source 1..50: mol_type = other DNA
atcactttctacaaaataaccgaaacgaaaaacgtcgcgcgcaaataccg

SEQ ID NO: 49551 - DNA, 50 bp, synthetic construct
  source 1..50: mol_type = other DNA
tccactcaaaatccactaaacctataaaacaccaaaaaactctaaaacca

SEQ ID NO: 49552 - DNA, 50 bp, synthetic construct
  source 1..50: mol_type = other DNA
tccgctcaaaatccactaaacctataaaacgccgaaaaactctaaaaccg

SEQ ID NO: 49553 - DNA, 50 bp, synthetic construct
  source 1..50: mol_type = other DNA
tccaaaaactaacaaaaaataatctataacaacaatcccaaaacttccca

SEQ ID NO: 49554 - DNA, 50 bp, synthetic construct
  source 1..50: mol_type = other DNA
tccgaaaactaacgaaaaataatctataacaacgatcccaaaacttcccg

SEQ ID NO: 49555 - DNA, 50 bp, synthetic construct
  source 1..50: mol_type = other DNA
atacaccaaaaccctaaaacatacatacccaataatcataacattctcca

SEQ ID NO: 49556 - DNA, 50 bp, synthetic construct
  source 1..50: mol_type = other DNA
atacgccgaaaccctaaaacgtacatacccgataatcataacattctccg

SEQ ID NO: 49557 - DNA, 50 bp, synthetic construct
  source 1..50: mol_type = other DNA
tctaaacaaaaaatattataaccaccaaacatacacacttcaaaacccca

SEQ ID NO: 49558 - DNA, 50 bp, synthetic construct
  source 1..50: mol_type = other DNA
tctaaacgaaaaatattataaccaccgaacatacacgcttcaaaaccccg

SEQ ID NO: 49559 - DNA, 50 bp, synthetic construct
  source 1..50: mol_type = other DNA
aaaacaatacctaacaaaatccaaccctcaaatcccaaataaaaaaacca

SEQ ID NO: 49560 - DNA, 50 bp, synthetic construct
  source 1..50: mol_type = other DNA
aaaacgatacctaacgaaatccaaccctcgaatcccaaataaaaaaaccg

SEQ ID NO: 49561 - DNA, 50 bp, synthetic construct
  source 1..50: mol_type = other DNA
tacctaacaaaatccaaccctcaaatcccaaataaaaaaaccaaaaaaca

SEQ ID NO: 49562 - DNA, 50 bp, synthetic construct
  source 1..50: mol_type = other DNA
tacctaacgaaatccaaccctcgaatcccaaataaaaaaaccgaaaaacg

SEQ ID NO: 49563 - DNA, 50 bp, synthetic construct
  source 1..50: mol_type = other DNA
aacaaaatccaaccctcaaatcccaaataaaaaaaccaaaaaacaataca

SEQ ID NO: 49564 - DNA, 50 bp, synthetic construct
  source 1..50: mol_type = other DNA
aacgaaatccaaccctcgaatcccaaataaaaaaaccgaaaaacgatacg

SEQ ID NO: 49565 - DNA, 50 bp, synthetic construct
  source 1..50: mol_type = other DNA
atccaaccctcaaatcccaaataaaaaaaccaaaaaacaatacaaaatca

SEQ ID NO: 49566 - DNA, 50 bp, synthetic construct
  source 1..50: mol_type = other DNA
atccaaccctcgaatcccaaataaaaaaaccgaaaaacgatacgaaatcg

SEQ ID NO: 49567 - DNA, 50 bp, synthetic construct
  source 1..50: mol_type = other DNA
caaccctcaaatcccaaataaaaaaaccaaaaaacaatacaaaatcaaca

SEQ ID NO: 49568 - DNA, 50 bp, synthetic construct
  source 1..50: mol_type = other DNA
caaccctcgaatcccaaataaaaaaaccgaaaaacgatacgaaatcgacg

SEQ ID NO: 49569 - DNA, 50 bp, synthetic construct
  source 1..50: mol_type = other DNA
aaaacaaaaatccccaaccaccaaacccatcaataacctattaaaaacca

SEQ ID NO: 49570 - DNA, 50 bp, synthetic construct
  source 1..50: mol_type = other DNA
aaaacaaaaatccccaaccaccaaacccgtcgataacctattaaaaaccg

SEQ ID NO: 49571 - DNA, 50 bp, synthetic construct
  source 1..50: mol_type = other DNA
cttccttaaacaacaataataacaatataaaaattaaccaaacataaaca

SEQ ID NO: 49572 - DNA, 50 bp, synthetic construct
  source 1..50: mol_type = other DNA
cttccttaaacaacaataataacaatataaaaattaaccaaacgtaaacg

SEQ ID NO: 49573 - DNA, 50 bp, synthetic construct
  source 1..50: mol_type = other DNA
aataacaatataaaaattaaccaaacataaacaaaacacaataactcaca

SEQ ID NO: 49574 - DNA, 50 bp, synthetic construct
  source 1..50: mol_type = other DNA
aataacaatataaaaattaaccaaacgtaaacgaaacacaataactcacg

SEQ ID NO: 49575 - DNA, 50 bp, synthetic construct
  source 1..50: mol_type = other DNA
acaaaacccattctctacaatatatacaaaaattaaccaacataataaca

SEQ ID NO: 49576 - DNA, 50 bp, synthetic construct
  source 1..50: mol_type = other DNA
acgaaacccattctctacaatatatacaaaaattaaccgacataataacg

SEQ ID NO: 49577 - DNA, 50 bp, synthetic construct
  source 1..50: mol_type = other DNA
ttaaaaacaaaaaacaataattaactttatttctaaccacaattaatcca

SEQ ID NO: 49578 - DNA, 50 bp, synthetic construct
  source 1..50: mol_type = other DNA
ttaaaaacgaaaaacgataattaactttatttctaaccacaattaatccg

SEQ ID NO: 49579 - DNA, 50 bp, synthetic construct
  source 1..50: mol_type = other DNA
taaaaaccaaactaactataaccaaaaacaaaattaaccaccacccccca

SEQ ID NO: 49580 - DNA, 50 bp, synthetic construct
  source 1..50: mol_type = other DNA
taaaaaccgaactaactataaccaaaaacaaaattaaccaccgccccccg

SEQ ID NO: 49581 - DNA, 50 bp, synthetic construct
  source 1..50: mol_type = other DNA
taacctacttaacaaaccccataaaacacataattctacaaacacctaca

SEQ ID NO: 49582 - DNA, 50 bp, synthetic construct
  source 1..50: mol_type = other DNA
taacctacttaacaaaccccgtaaaacgcgtaattctacaaacacctacg

SEQ ID NO: 49583 - DNA, 50 bp, synthetic construct
  source 1..50: mol_type = other DNA
caacaactaatcaacaaaactaacctacttaacaaaccccataaaacaca

SEQ ID NO: 49584 - DNA, 50 bp, synthetic construct
  source 1..50: mol_type = other DNA
caacaactaatcgacaaaactaacctacttaacaaaccccgtaaaacgcg

SEQ ID NO: 49585 - DNA, 50 bp, synthetic construct
  source 1..50: mol_type = other DNA
ccataaataaaccaaaaacacctatcattaaaatcctacacataacccca

SEQ ID NO: 49586 - DNA, 50 bp, synthetic construct
  source 1..50: mol_type = other DNA
ccgtaaataaaccgaaaacgcctatcgttaaaatcctacacataaccccg

SEQ ID NO: 49587 - DNA, 50 bp, synthetic construct
  source 1..50: mol_type = other DNA
ataaataaaccaaaaacacctatcattaaaatcctacacataaccccaca

SEQ ID NO: 49588 - DNA, 50 bp, synthetic construct
  source 1..50: mol_type = other DNA
gtaaataaaccgaaaacgcctatcgttaaaatcctacacataaccccgcg

SEQ ID NO: 49589 - DNA, 50 bp, synthetic construct
  source 1..50: mol_type = other DNA
tacacacacacaaaacaaaaccccaaaaaaaaactattaaaaaaccaaca

SEQ ID NO: 49590 - DNA, 50 bp, synthetic construct
  source 1..50: mol_type = other DNA
tacgcacgcgcgaaacaaaaccccgaaaaaaaactattaaaaaaccaacg

SEQ ID NO: 49591 - DNA, 50 bp, synthetic construct
  source 1..50: mol_type = other DNA
ggatagtgaggaggttgattttgagtagatatttaaatttttaataagtt

SEQ ID NO: 49592 - DNA, 50 bp, synthetic construct
  source 1..50: mol_type = other DNA
ggatagtgaggaggttgattttgagtagatatttaaatttttaataagtc

SEQ ID NO: 49593 - DNA, 50 bp, synthetic construct
  source 1..50: mol_type = other DNA
acacaaaaaacaaaaccctaaaaacaacaacaatattatccaataaacca

SEQ ID NO: 49594 - DNA, 50 bp, synthetic construct
  source 1..50: mol_type = other DNA
gcgcaaaaaacgaaaccctaaaaacgacaacgatattatccaataaaccg

SEQ ID NO: 49595 - DNA, 50 bp, synthetic construct
  source 1..50: mol_type = other DNA
aacacactcctccacaataaacaaaaataataaaacaactctaaaaacca

SEQ ID NO: 49596 - DNA, 50 bp, synthetic construct
  source 1..50: mol_type = other DNA
aacgcgctcctccgcgataaacgaaaataataaaacaactctaaaaaccg

SEQ ID NO: 49597 - DNA, 50 bp, synthetic construct
  source 1..50: mol_type = other DNA
atatatcaactcaacatttctcctctcatccctaataaaatataacaaca

SEQ ID NO: 49598 - DNA, 50 bp, synthetic construct
  source 1..50: mol_type = other DNA
atatatcaactcaacgtttctcctctcgtccctaataaaatataacgacg

SEQ ID NO: 49599 - DNA, 50 bp, synthetic construct
  source 1..50: mol_type = other DNA
cacaacctaaattaatctaataaaccaaaaaacaaacatcattcacaaca

SEQ ID NO: 49600 - DNA, 50 bp, synthetic construct
  source 1..50: mol_type = other DNA
cgcgacctaaattaatctaataaaccgaaaaacgaacgtcgttcgcaacg

SEQ ID NO: 49601 - DNA, 50 bp, synthetic construct
  source 1..50: mol_type = other DNA
aaaaaccacctaaattttccacaacaccaacaaatcaaaatacaaactca

SEQ ID NO: 49602 - DNA, 50 bp, synthetic construct
  source 1..50: mol_type = other DNA
aaaaaccacctaaattttccacaacaccaacgaatcgaaatacgaactcg

SEQ ID NO: 49603 - DNA, 50 bp, synthetic construct
  source 1..50: mol_type = other DNA
aaaacaaaaaaccacctaaattttccacaacaccaacaaatcaaaataca

SEQ ID NO: 49604 - DNA, 50 bp, synthetic construct
  source 1..50: mol_type = other DNA
aaaacgaaaaaccacctaaattttccacaacaccaacgaatcgaaatacg

SEQ ID NO: 49605 - DNA, 50 bp, synthetic construct
  source 1..50: mol_type = other DNA
aactacaaaaacaaaaaaccacctaaattttccacaacaccaacaaatca

SEQ ID NO: 49606 - DNA, 50 bp, synthetic construct
  source 1..50: mol_type = other DNA
aactacgaaaacgaaaaaccacctaaattttccacaacaccaacgaatcg

SEQ ID NO: 49607 - DNA, 50 bp, synthetic construct
  source 1..50: mol_type = other DNA
aatcctaaaaaataaaaatcttaatccccactttaaaaactacaaaaaca

SEQ ID NO: 49608 - DNA, 50 bp, synthetic construct
  source 1..50: mol_type = other DNA
aatcctaaaaaataaaaatcttaatccccactttaaaaactacgaaaacg

SEQ ID NO: 49609 - DNA, 50 bp, synthetic construct
  source 1..50: mol_type = other DNA
aaaatcaactaaatctctctaatccacaaaaaaaaccatccctctaccca

SEQ ID NO: 49610 - DNA, 50 bp, synthetic construct
  source 1..50: mol_type = other DNA
aaaatcaactaaatctctctaatccgcaaaaaaaaccgtccctctacccg

SEQ ID NO: 49611 - DNA, 50 bp, synthetic construct
  source 1..50: mol_type = other DNA
aaaaaaaatattcactctaatataaaataacaactaaaaaaaactatcca

SEQ ID NO: 49612 - DNA, 50 bp, synthetic construct
  source 1..50: mol_type = other DNA
aaaaaaaatattcactctaatataaaataacaactaaaaaaaactatccg

SEQ ID NO: 49613 - DNA, 50 bp, synthetic construct
  source 1..50: mol_type = other DNA
ttattcaaattaaaatacaataacaaaatctcaactcactacaacctcca

SEQ ID NO: 49614 - DNA, 50 bp, synthetic construct
  source 1..50: mol_type = other DNA
ttattcaaattaaaatacaataacgaaatctcaactcactacaacctccg

SEQ ID NO: 49615 - DNA, 50 bp, synthetic construct
  source 1..50: mol_type = other DNA
aaacaataaaaaaaaatccaaaaataaacctaacaccattccaacatcca

SEQ ID NO: 49616 - DNA, 50 bp, synthetic construct
  source 1..50: mol_type = other DNA
aaacaataaaaaaaaatccgaaaataaacctaacaccattccgacatccg

SEQ ID NO: 49617 - DNA, 50 bp, synthetic construct
  source 1..50: mol_type = other DNA
caacccatcatacaaaaaaataatctcttccttcaccaaaaaccactaca

SEQ ID NO: 49618 - DNA, 50 bp, synthetic construct
  source 1..50: mol_type = other DNA
caacccgtcgtacaaaaaaataatctcttccttcaccgaaaaccactacg

SEQ ID NO: 49619 - DNA, 50 bp, synthetic construct
  source 1..50: mol_type = other DNA
aaaacaaaattacacaaacaaaacaacaaataaaacaccactaacaaaca

SEQ ID NO: 49620 - DNA, 50 bp, synthetic construct
  source 1..50: mol_type = other DNA
aaaacgaaattacacgaacgaaacaacaaataaaacgccgctaacgaacg

SEQ ID NO: 49621 - DNA, 50 bp, synthetic construct
  source 1..50: mol_type = other DNA
aattaattaccaaacaacaaaaacaaatcctactcctaaaaacaacaaca

SEQ ID NO: 49622 - DNA, 50 bp, synthetic construct
  source 1..50: mol_type = other DNA
aattaattaccgaacgacaaaaacgaatcctactcctaaaaacgacgacg

SEQ ID NO: 49623 - DNA, 50 bp, synthetic construct
  source 1..50: mol_type = other DNA
aacaattaattaccaaacaacaaaaacaaatcctactcctaaaaacaaca

SEQ ID NO: 49624 - DNA, 50 bp, synthetic construct
  source 1..50: mol_type = other DNA
aacaattaattaccgaacgacaaaaacgaatcctactcctaaaaacgacg

SEQ ID NO: 49625 - DNA, 50 bp, synthetic construct
  source 1..50: mol_type = other DNA
actatcaataaaacaccatattaaaaacaaaactcccaacatacctcaca

SEQ ID NO: 49626 - DNA, 50 bp, synthetic construct
  source 1..50: mol_type = other DNA
actatcaataaaacgccatattaaaaacgaaactcccgacatacctcgcg

SEQ ID NO: 49627 - DNA, 50 bp, synthetic construct
  source 1..50: mol_type = other DNA
aaaaccaacaaaaatcaaaccaaaaacaaacaacaacaaaaaactaaaca

SEQ ID NO: 49628 - DNA, 50 bp, synthetic construct
  source 1..50: mol_type = other DNA
aaaaccgacgaaaatcaaaccgaaaacaaacgacaacgaaaaactaaacg

SEQ ID NO: 49629 - DNA, 50 bp, synthetic construct
  source 1..50: mol_type = other DNA
taaaaacacaaacccaaacaaaaaatacacacctaaataaaaacaaaaca

SEQ ID NO: 49630 - DNA, 50 bp, synthetic construct
  source 1..50: mol_type = other DNA
taaaaacgcgaacccgaacaaaaaatacacacctaaataaaaacaaaacg

SEQ ID NO: 49631 - DNA, 50 bp, synthetic construct
  source 1..50: mol_type = other DNA
aacataaaaacaaaaaataatctctatactctacccaaaataaaaacaca

SEQ ID NO: 49632 - DNA, 50 bp, synthetic construct
  source 1..50: mol_type = other DNA
aacgtaaaaacaaaaaataatctctatactctacccaaaataaaaacgcg

SEQ ID NO: 49633 - DNA, 50 bp, synthetic construct
  source 1..50: mol_type = other DNA
accacattaaaattccacactaaaaccaaaaaatttcacatctcccaaca

SEQ ID NO: 49634 - DNA, 50 bp, synthetic construct
  source 1..50: mol_type = other DNA
accacgttaaaattccgcactaaaaccaaaaaatttcgcgtctcccaacg

SEQ ID NO: 49635 - DNA, 50 bp, synthetic construct
  source 1..50: mol_type = other DNA
aaaatcacaaaaaccaaaaaacaacttccaatcaaaaacactaaaaaaca

SEQ ID NO: 49636 - DNA, 50 bp, synthetic construct
  source 1..50: mol_type = other DNA
aaaatcgcaaaaaccaaaaaacgacttccgatcgaaaacgctaaaaaacg

SEQ ID NO: 49637 - DNA, 50 bp, synthetic construct
  source 1..50: mol_type = other DNA
ctcaatatcatcctctaaaacccaaaaccaaaaacacaatacacacacca

SEQ ID NO: 49638 - DNA, 50 bp, synthetic construct
  source 1..50: mol_type = other DNA
ctcaatatcatcctctaaaacccaaaaccaaaaacacaatacacgcgccg

SEQ ID NO: 49639 - DNA, 50 bp, synthetic construct
  source 1..50: mol_type = other DNA
caaaaccctttcaaaaacccataacaaactaataaatattaaaaaaaaca

SEQ ID NO: 49640 - DNA, 50 bp, synthetic construct
  source 1..50: mol_type = other DNA
cgaaaccctttcgaaaacccgtaacaaactaataaatattaaaaaaaacg

SEQ ID NO: 49641 - DNA, 50 bp, synthetic construct
  source 1..50: mol_type = other DNA
atcactcaaaatataatacaataacataatcacaactcactacaacccca

SEQ ID NO: 49642 - DNA, 50 bp, synthetic construct
  source 1..50: mol_type = other DNA
atcgctcaaaatataatacaataacgtaatcacgactcactacaaccccg

SEQ ID NO: 49643 - DNA, 50 bp, synthetic construct
  source 1..50: mol_type = other DNA
aaatataatacaataacataatcacaactcactacaaccccaacttctca

SEQ ID NO: 49644 - DNA, 50 bp, synthetic construct
  source 1..50: mol_type = other DNA
aaatataatacaataacgtaatcacgactcactacaaccccgacttctcg

SEQ ID NO: 49645 - DNA, 50 bp, synthetic construct
  source 1..50: mol_type = other DNA
acctcatctctacaaaaaatacaaaaaactaaccaaacataaaaactaca

SEQ ID NO: 49646 - DNA, 50 bp, synthetic construct
  source 1..50: mol_type = other DNA
acctcatctctacaaaaaatacaaaaaactaaccgaacgtaaaaactacg

SEQ ID NO: 49647 - DNA, 50 bp, synthetic construct
  source 1..50: mol_type = other DNA
caacactttaaaaaactacaacaaaaaattcacttaaaccaaaaaattca

SEQ ID NO: 49648 - DNA, 50 bp, synthetic construct
  source 1..50: mol_type = other DNA
caacactttaaaaaactacgacaaaaaattcgcttaaaccaaaaaattcg

SEQ ID NO: 49649 - DNA, 50 bp, synthetic construct
  source 1..50: mol_type = other DNA
ttttacccaaactaacctcaaactccttaacttaaacaaacctcttacca

SEQ ID NO: 49650 - DNA, 50 bp, synthetic construct
  source 1..50: mol_type = other DNA
ttttacccaaactaacctcgaactccttaacttaaacgaacctcttaccg

SEQ ID NO: 49651 - DNA, 50 bp, synthetic construct
  source 1..50: mol_type = other DNA
acaacaatttataaaacaaaataaataaaatcaatataacaacaaaccca

SEQ ID NO: 49652 - DNA, 50 bp, synthetic construct
  source 1..50: mol_type = other DNA
acgacgatttataaaacgaaataaataaaatcgatataacaacgaacccg

SEQ ID NO: 49653 - DNA, 50 bp, synthetic construct
  source 1..50: mol_type = other DNA
aataacacaataaaccaaaacaactaaaccactaaaaacccaaccccaca

SEQ ID NO: 49654 - DNA, 50 bp, synthetic construct
  source 1..50: mol_type = other DNA
aataacacaataaaccaaaacgactaaaccactaaaaacccgaccccgcg

SEQ ID NO: 49655 - DNA, 50 bp, synthetic construct
  source 1..50: mol_type = other DNA
aaaaacatataaaaaaatcaaaaatcctacataaaatccccaaatacaca

SEQ ID NO: 49656 - DNA, 50 bp, synthetic construct
  source 1..50: mol_type = other DNA
aaaaacatataaaaaaatcaaaaatcctacgtaaaatccccaaatacacg

SEQ ID NO: 49657 - DNA, 50 bp, synthetic construct
  source 1..50: mol_type = other DNA
acaaaatcataaaaacaccaaataaaaaaaactccactaactacacacca

SEQ ID NO: 49658 - DNA, 50 bp, synthetic construct
  source 1..50: mol_type = other DNA
acgaaatcgtaaaaacaccgaataaaaaaaactccactaactacgcaccg

SEQ ID NO: 49659 - DNA, 50 bp, synthetic construct
  source 1..50: mol_type = other DNA
tacataaacataacaaaaacaaaacccaaccaacaaaacaacaaaaaaca

SEQ ID NO: 49660 - DNA, 50 bp, synthetic construct
  source 1..50: mol_type = other DNA
tacgtaaacgtaacgaaaacaaaacccgaccgacgaaacaacgaaaaacg

SEQ ID NO: 49661 - DNA, 50 bp, synthetic construct
  source 1..50: mol_type = other DNA
aaatacaatccaacccaaaaaaatccttccccaccaaaactacataaaca

SEQ ID NO: 49662 - DNA, 50 bp, synthetic construct
  source 1..50: mol_type = other DNA
aaatacgatccaacccaaaaaaatccttccccaccaaaactacgtaaacg

SEQ ID NO: 49663 - DNA, 50 bp, synthetic construct
  source 1..50: mol_type = other DNA
aacaaatccaacaaaactaaaaaaccaaccaaccaaaaaacatcctaaca

SEQ ID NO: 49664 - DNA, 50 bp, synthetic construct
  source 1..50: mol_type = other DNA
aacaaatccgacaaaactaaaaaaccgaccgaccgaaaaacatcctaacg

SEQ ID NO: 49665 - DNA, 50 bp, synthetic construct
  source 1..50: mol_type = other DNA
aactaaacaaaaccctctacccaaacaaatccaacaaaactaaaaaacca

SEQ ID NO: 49666 - DNA, 50 bp, synthetic construct
  source 1..50: mol_type = other DNA
aactaaacgaaaccctctacccaaacaaatccgacaaaactaaaaaaccg

SEQ ID NO: 49667 - DNA, 50 bp, synthetic construct
  source 1..50: mol_type = other DNA
aacattttaattaacaaatataaacacaaacaaccaactaaccaaccaca

SEQ ID NO: 49668 - DNA, 50 bp, synthetic construct
  source 1..50: mol_type = other DNA
aacattttaattaacgaatataaacacgaacaaccaactaaccgaccgcg

SEQ ID NO: 49669 - DNA, 50 bp, synthetic construct
  source 1..50: mol_type = other DNA
aaatactaaaaaacaaaacccaaaacaaaaaccacacccataaaacctca

SEQ ID NO: 49670 - DNA, 50 bp, synthetic construct
  source 1..50: mol_type = other DNA
aaatactaaaaaacgaaacccgaaacaaaaaccacgcccgtaaaacctcg

SEQ ID NO: 49671 - DNA, 50 bp, synthetic construct
  source 1..50: mol_type = other DNA
aacaacacactcacaacaaaaaatcacaaaacctaaaactatatctatca

SEQ ID NO: 49672 - DNA, 50 bp, synthetic construct
  source 1..50: mol_type = other DNA
aacaacgcgctcgcaacgaaaaatcgcgaaacctaaaactatatctatcg

SEQ ID NO: 49673 - DNA, 50 bp, synthetic construct
  source 1..50: mol_type = other DNA
taaaaaaaataacactacattctacccaccatcaaaccaacaaaaccaca

SEQ ID NO: 49674 - DNA, 50 bp, synthetic construct
  source 1..50: mol_type = other DNA
taaaaaaaataacactacattctacccgccgtcaaaccgacaaaaccacg

SEQ ID NO: 49675 - DNA, 50 bp, synthetic construct
  source 1..50: mol_type = other DNA
tcatccatacaatacttcatcatcttaattcctccctacactaacaaaca

SEQ ID NO: 49676 - DNA, 50 bp, synthetic construct
  source 1..50: mol_type = other DNA
tcatccgtacgatacttcgtcatcttaattcctccctacactaacaaacg

SEQ ID NO: 49677 - DNA, 50 bp, synthetic construct
  source 1..50: mol_type = other DNA
ctacattcaaccaaatatctaaaaacaaacaatccaaccccaaaatccca

SEQ ID NO: 49678 - DNA, 50 bp, synthetic construct
  source 1..50: mol_type = other DNA
ctacattcaaccaaatatctaaaaacaaacgatccaaccccgaaatcccg

SEQ ID NO: 49679 - DNA, 50 bp, synthetic construct
  source 1..50: mol_type = other DNA
gttttgttaaatattggtatattgggaggagaagaaaagtaaaagttatt

SEQ ID NO: 49680 - DNA, 50 bp, synthetic construct
  source 1..50: mol_type = other DNA
gttttgttaaatattggtatatcgggaggagaagaaaagtaaaagttatc

SEQ ID NO: 49681 - DNA, 50 bp, synthetic construct
  source 1..50: mol_type = other DNA
aaacaccccaaaactaactcataaaaatatttcctaaacaaaaaaactca

SEQ ID NO: 49682 - DNA, 50 bp, synthetic construct
  source 1..50: mol_type = other DNA
aaacaccccgaaactaactcgtaaaaatatttcctaaacaaaaaaactcg

SEQ ID NO: 49683 - DNA, 50 bp, synthetic construct
  source 1..50: mol_type = other DNA
ccaaaaataaaaatcccacaaataaaaaattaaatccaacaaacacccca

SEQ ID NO: 49684 - DNA, 50 bp, synthetic construct
  source 1..50: mol_type = other DNA
ccgaaaataaaaatcccacgaataaaaaattaaatccgacaaacaccccg

SEQ ID NO: 49685 - DNA, 50 bp, synthetic construct
  source 1..50: mol_type = other DNA
aaactccaaaaaaccaaaaaacaacaaaaataaaaatcaaaacaccaaca

SEQ ID NO: 49686 - DNA, 50 bp, synthetic construct
  source 1..50: mol_type = other DNA
aaactccgaaaaaccgaaaaacgacaaaaataaaaatcgaaacgccgacg

SEQ ID NO: 49687 - DNA, 50 bp, synthetic construct
  source 1..50: mol_type = other DNA
acaaaactccaaaaaaccaaaaaacaacaaaaataaaaatcaaaacacca

SEQ ID NO: 49688 - DNA, 50 bp, synthetic construct
  source 1..50: mol_type = other DNA
acgaaactccgaaaaaccgaaaaacgacaaaaataaaaatcgaaacgccg

SEQ ID NO: 49689 - DNA, 50 bp, synthetic construct
  source 1..50: mol_type = other DNA
aatacaaaactccaaaaaaccaaaaaacaacaaaaataaaaatcaaaaca

SEQ ID NO: 49690 - DNA, 50 bp, synthetic construct
  source 1..50: mol_type = other DNA
aatacgaaactccgaaaaaccgaaaaacgacaaaaataaaaatcgaaacg

SEQ ID NO: 49691 - DNA, 50 bp, synthetic construct
  source 1..50: mol_type = other DNA
ccataacaaaacaaacctactcataataaatacaaaactccaaaaaacca

SEQ ID NO: 49692 - DNA, 50 bp, synthetic construct
  source 1..50: mol_type = other DNA
ccataacgaaacaaacctactcgtaataaatacgaaactccgaaaaaccg

SEQ ID NO: 49693 - DNA, 50 bp, synthetic construct
  source 1..50: mol_type = other DNA
cccacaaaaaacaacaccataacaaaacaaacctactcataataaataca

SEQ ID NO: 49694 - DNA, 50 bp, synthetic construct
  source 1..50: mol_type = other DNA
cccacgaaaaacaacgccataacgaaacaaacctactcgtaataaatacg

SEQ ID NO: 49695 - DNA, 50 bp, synthetic construct
  source 1..50: mol_type = other DNA
aaccaaaaaacataaccaacaaacaaaaacaacaacaactaaaaaaaaca

SEQ ID NO: 49696 - DNA, 50 bp, synthetic construct
  source 1..50: mol_type = other DNA
gaccgaaaaacataaccgacgaacgaaaacgacgacgactaaaaaaaacg

SEQ ID NO: 49697 - DNA, 50 bp, synthetic construct
  source 1..50: mol_type = other DNA
caactaaaaaaaacactaaacaataaaacaaaaccactcaatcacaccca

SEQ ID NO: 49698 - DNA, 50 bp, synthetic construct
  source 1..50: mol_type = other DNA
cgactaaaaaaaacgctaaacgataaaacgaaaccactcgatcacacccg

SEQ ID NO: 49699 - DNA, 50 bp, synthetic construct
  source 1..50: mol_type = other DNA
cacatcaaaattcccaattaactaatacaacaacccctcaaaaaaaaaca

SEQ ID NO: 49700 - DNA, 50 bp, synthetic construct
  source 1..50: mol_type = other DNA
cgcatcgaaattcccgattaactaatacaacaacccctcgaaaaaaaacg

SEQ ID NO: 49701 - DNA, 50 bp, synthetic construct
  source 1..50: mol_type = other DNA
taacaattaacaactaaataacaaccaacaaacacacatcaaaattccca

SEQ ID NO: 49702 - DNA, 50 bp, synthetic construct
  source 1..50: mol_type = other DNA
taacgattaacaactaaataacaaccaacaaacgcgcatcgaaattcccg

SEQ ID NO: 49703 - DNA, 50 bp, synthetic construct
  source 1..50: mol_type = other DNA
ttaaaagttggaagtaattaaagtgttttttaataggtgaagggataaat

SEQ ID NO: 49704 - DNA, 50 bp, synthetic construct
  source 1..50: mol_type = other DNA
ttaaaagttggaagtaattaaagtgttttttaataggtgaagggataaac

SEQ ID NO: 49705 - DNA, 50 bp, synthetic construct
  source 1..50: mol_type = other DNA
ctcactttcaaataaaccaaaaactcaacaatatacaaacaacataccca

SEQ ID NO: 49706 - DNA, 50 bp, synthetic construct
  source 1..50: mol_type = other DNA
ctcgctttcaaataaaccgaaaactcaacaatatacaaacgacgtacccg

SEQ ID NO: 49707 - DNA, 50 bp, synthetic construct
  source 1..50: mol_type = other DNA
cactttcaaataaaccaaaaactcaacaatatacaaacaacatacccaca

SEQ ID NO: 49708 - DNA, 50 bp, synthetic construct
  source 1..50: mol_type = other DNA
cgctttcaaataaaccgaaaactcaacaatatacaaacgacgtacccgcg

SEQ ID NO: 49709 - DNA, 50 bp, synthetic construct
  source 1..50: mol_type = other DNA
tctacacccaaaaactcctaaaacatctttccaacaaaaccaaaaaaaca

SEQ ID NO: 49710 - DNA, 50 bp, synthetic construct
  source 1..50: mol_type = other DNA
tctacgcccaaaaactcctaaaacgtctttccgacgaaaccaaaaaaacg

SEQ ID NO: 49711 - DNA, 50 bp, synthetic construct
  source 1..50: mol_type = other DNA
tccaaaacaacaaaacaaaaatacaaaatcctcaaataaaaataaactca

SEQ ID NO: 49712 - DNA, 50 bp, synthetic construct
  source 1..50: mol_type = other DNA
tccaaaacaacgaaacaaaaatacaaaatcctcaaataaaaataaactcg

SEQ ID NO: 49713 - DNA, 50 bp, synthetic construct
  source 1..50: mol_type = other DNA
ataaaaattacaataaactaaaattacaccacttcactcctacctataca

SEQ ID NO: 49714 - DNA, 50 bp, synthetic construct
  source 1..50: mol_type = other DNA
ataaaaattacaataaactaaaattacgccacttcactcctacctatacg

SEQ ID NO: 49715 - DNA, 50 bp, synthetic construct
  source 1..50: mol_type = other DNA
tttcttaaaacaaaatctcactttatcacacaaacaaaaataaaataaca

SEQ ID NO: 49716 - DNA, 50 bp, synthetic construct
  source 1..50: mol_type = other DNA
tttcttaaaacaaaatctcactttatcgcacaaacaaaaataaaataacg

SEQ ID NO: 49717 - DNA, 50 bp, synthetic construct
  source 1..50: mol_type = other DNA
aactatatctacacaaattcccatacaataccaacaactaaatacaaaca

SEQ ID NO: 49718 - DNA, 50 bp, synthetic construct
  source 1..50: mol_type = other DNA
aactatatctacgcgaattcccgtacgataccgacaactaaatacgaacg

SEQ ID NO: 49719 - DNA, 50 bp, synthetic construct
  source 1..50: mol_type = other DNA
acaaacccaaacaaacaaaacaaactaatccctaaaacctaaaatctaca

SEQ ID NO: 49720 - DNA, 50 bp, synthetic construct
  source 1..50: mol_type = other DNA
acgaacccgaacgaacgaaacgaactaatccctaaaacctaaaatctacg

SEQ ID NO: 49721 - DNA, 50 bp, synthetic construct
  source 1..50: mol_type = other DNA
aaacaaactaatccctaaaacctaaaatctacacattctaaaaaccacca

SEQ ID NO: 49722 - DNA, 50 bp, synthetic construct
  source 1..50: mol_type = other DNA
aaacgaactaatccctaaaacctaaaatctacgcattctaaaaaccgccg

SEQ ID NO: 49723 - DNA, 50 bp, synthetic construct
  source 1..50: mol_type = other DNA
tccctaaaacctaaaatctacacattctaaaaaccaccaacataaaaaca

SEQ ID NO: 49724 - DNA, 50 bp, synthetic construct
  source 1..50: mol_type = other DNA
tccctaaaacctaaaatctacgcattctaaaaaccgccgacataaaaacg

SEQ ID NO: 49725 - DNA, 50 bp, synthetic construct
  source 1..50: mol_type = other DNA
caccaaaatacaaacataaaactcatacaacaaaaccaaaacaaataaca

SEQ ID NO: 49726 - DNA, 50 bp, synthetic construct
  source 1..50: mol_type = other DNA
cgccgaaatacgaacgtaaaactcgtacaacgaaaccaaaacgaataacg

SEQ ID NO: 49727 - DNA, 50 bp, synthetic construct
  source 1..50: mol_type = other DNA
aataaattaaaaaccaaaacaccactactataaaaaaaactaaatcacca

SEQ ID NO: 49728 - DNA, 50 bp, synthetic construct
  source 1..50: mol_type = other DNA
aataaattaaaaaccgaaacgccgctactataaaaaaaactaaatcaccg

SEQ ID NO: 49729 - DNA, 50 bp, synthetic construct
  source 1..50: mol_type = other DNA
cccaaaaaaacaacccaaaatctcaaaaactcatttctaaaaaataaaca

SEQ ID NO: 49730 - DNA, 50 bp, synthetic construct
  source 1..50: mol_type = other DNA
cccaaaaaaacaacccgaaatctcgaaaactcgtttctaaaaaataaacg

SEQ ID NO: 49731 - DNA, 50 bp, synthetic construct
  source 1..50: mol_type = other DNA
caacccaactaaacaaacaaaaaataaacacataaaaaaaacaaacacca

SEQ ID NO: 49732 - DNA, 50 bp, synthetic construct
  source 1..50: mol_type = other DNA
cgacccaactaaacgaacgaaaaataaacgcgtaaaaaaaacgaacgccg

SEQ ID NO: 49733 - DNA, 50 bp, synthetic construct
  source 1..50: mol_type = other DNA
caaaaaataaacacataaaaaaaacaaacaccataaaccaaaccacaaca

SEQ ID NO: 49734 - DNA, 50 bp, synthetic construct
  source 1..50: mol_type = other DNA
cgaaaaataaacgcgtaaaaaaaacgaacgccgtaaaccgaaccacaacg

SEQ ID NO: 49735 - DNA, 50 bp, synthetic construct
  source 1..50: mol_type = other DNA
atctaacatccacacactacacaataacaactctaaaaaattaactatca

SEQ ID NO: 49736 - DNA, 50 bp, synthetic construct
  source 1..50: mol_type = other DNA
gtctaacgtccgcgcgctacacaataacgactctaaaaaattaactatcg

SEQ ID NO: 49737 - DNA, 50 bp, synthetic construct
  source 1..50: mol_type = other DNA
ccacacaaaacaaaacatatacaaaacctaaaaacacaaaaataaatcca

SEQ ID NO: 49738 - DNA, 50 bp, synthetic construct
  source 1..50: mol_type = other DNA
ccgcgcgaaacgaaacatatacaaaacctaaaaacgcgaaaataaatccg

SEQ ID NO: 49739 - DNA, 50 bp, synthetic construct
  source 1..50: mol_type = other DNA
cacaaaacaaaacatatacaaaacctaaaaacacaaaaataaatccaaca

SEQ ID NO: 49740 - DNA, 50 bp, synthetic construct
  source 1..50: mol_type = other DNA
cgcgaaacgaaacatatacaaaacctaaaaacgcgaaaataaatccgacg

SEQ ID NO: 49741 - DNA, 50 bp, synthetic construct
  source 1..50: mol_type = other DNA
caaaacaaaacatatacaaaacctaaaaacacaaaaataaatccaacaca

SEQ ID NO: 49742 - DNA, 50 bp, synthetic construct
  source 1..50: mol_type = other DNA
cgaaacgaaacatatacaaaacctaaaaacgcgaaaataaatccgacgcg

SEQ ID NO: 49743 - DNA, 50 bp, synthetic construct
  source 1..50: mol_type = other DNA
atatacaaaacctaaaaacacaaaaataaatccaacacaaaactaaatca

SEQ ID NO: 49744 - DNA, 50 bp, synthetic construct
  source 1..50: mol_type = other DNA
atatacaaaacctaaaaacgcgaaaataaatccgacgcgaaactaaatcg

SEQ ID NO: 49745 - DNA, 50 bp, synthetic construct
  source 1..50: mol_type = other DNA
acaaaacctaaaaacacaaaaataaatccaacacaaaactaaatcaaaca

SEQ ID NO: 49746 - DNA, 50 bp, synthetic construct
  source 1..50: mol_type = other DNA
acaaaacctaaaaacgcgaaaataaatccgacgcgaaactaaatcgaacg

SEQ ID NO: 49747 - DNA, 50 bp, synthetic construct
  source 1..50: mol_type = other DNA
aaacctaaaaacacaaaaataaatccaacacaaaactaaatcaaacacca

SEQ ID NO: 49748 - DNA, 50 bp, synthetic construct
  source 1..50: mol_type = other DNA
aaacctaaaaacgcgaaaataaatccgacgcgaaactaaatcgaacgccg

SEQ ID NO: 49749 - DNA, 50 bp, synthetic construct
  source 1..50: mol_type = other DNA
taaaaacacaaaaataaatccaacacaaaactaaatcaaacaccataaca

SEQ ID NO: 49750 - DNA, 50 bp, synthetic construct
  source 1..50: mol_type = other DNA
taaaaacgcgaaaataaatccgacgcgaaactaaatcgaacgccgtaacg

SEQ ID NO: 49751 - DNA, 50 bp, synthetic construct
  source 1..50: mol_type = other DNA
aaactaaatcaaacaccataacactaacaaataaacaaaaactcaattca

SEQ ID NO: 49752 - DNA, 50 bp, synthetic construct
  source 1..50: mol_type = other DNA
aaactaaatcgaacgccgtaacgctaacgaataaacgaaaactcaattcg

SEQ ID NO: 49753 - DNA, 50 bp, synthetic construct
  source 1..50: mol_type = other DNA
ctaaccaactaaaccacttacttcctaatactaaaataacaacaccatca

SEQ ID NO: 49754 - DNA, 50 bp, synthetic construct
  source 1..50: mol_type = other DNA
ctaaccgactaaaccacttacttcctaatactaaaataacaacgccgtcg

SEQ ID NO: 49755 - DNA, 50 bp, synthetic construct
  source 1..50: mol_type = other DNA
tataactaaaaaacacaaaaacaaacaactcccacaacaactacaacaca

SEQ ID NO: 49756 - DNA, 50 bp, synthetic construct
  source 1..50: mol_type = other DNA
tataactaaaaaacacgaaaacgaacaactcccgcaacaactacaacacg

SEQ ID NO: 49757 - DNA, 50 bp, synthetic construct
  source 1..50: mol_type = other DNA
taaccttcatttactatttcaaaaaccaaaacctcatatattcccatcca

SEQ ID NO: 49758 - DNA, 50 bp, synthetic construct
  source 1..50: mol_type = other DNA
taaccttcgtttactatttcgaaaaccaaaacctcgtatattcccgtccg

SEQ ID NO: 49759 - DNA, 50 bp, synthetic construct
  source 1..50: mol_type = other DNA
taataaataaacactaaaccatccacattcttaaaccactcacccatcca

SEQ ID NO: 49760 - DNA, 50 bp, synthetic construct
  source 1..50: mol_type = other DNA
taataaataaacactaaaccatccacattcttaaaccgctcacccgtccg

SEQ ID NO: 49761 - DNA, 50 bp, synthetic construct
  source 1..50: mol_type = other DNA
caacaactaataaactaatttacatcaaatatttcctccactacctacca

SEQ ID NO: 49762 - DNA, 50 bp, synthetic construct
  source 1..50: mol_type = other DNA
cgacaactaataaactaatttacgtcaaatatttcctccgctacctaccg

SEQ ID NO: 49763 - DNA, 50 bp, synthetic construct
  source 1..50: mol_type = other DNA
taacaccacaactattttataaaaacaaaataaaccactataataaccca

SEQ ID NO: 49764 - DNA, 50 bp, synthetic construct
  source 1..50: mol_type = other DNA
taacaccgcgactattttataaaaacaaaataaaccactataataacccg

SEQ ID NO: 49765 - DNA, 50 bp, synthetic construct
  source 1..50: mol_type = other DNA
tatcacaataacttactctactctcacaaaacaatcacaataccactcca

SEQ ID NO: 49766 - DNA, 50 bp, synthetic construct
  source 1..50: mol_type = other DNA
tatcacaataacttactctactctcacaaaacaatcgcgataccactccg

SEQ ID NO: 49767 - DNA, 50 bp, synthetic construct
  source 1..50: mol_type = other DNA
aaccacctaaattcacaatttataaaatccttaaaacttccaaaaaaaca

SEQ ID NO: 49768 - DNA, 50 bp, synthetic construct
  source 1..50: mol_type = other DNA
aaccgcctaaattcgcgatttataaaatccttaaaacttccaaaaaaacg

SEQ ID NO: 49769 - DNA, 50 bp, synthetic construct
  source 1..50: mol_type = other DNA
taaaaaccccaaaaacctcataaaccacaaactcaaacaatcaaaaaaca

SEQ ID NO: 49770 - DNA, 50 bp, synthetic construct
  source 1..50: mol_type = other DNA
taaaaaccccaaaaacctcataaaccgcgaactcaaacgatcaaaaaacg

SEQ ID NO: 49771 - DNA, 50 bp, synthetic construct
  source 1..50: mol_type = other DNA
cctcataaaccacaaactcaaacaatcaaaaaacaaattaaaccaaacca

SEQ ID NO: 49772 - DNA, 50 bp, synthetic construct
  source 1..50: mol_type = other DNA
cctcataaaccgcgaactcaaacgatcaaaaaacgaattaaaccaaaccg

SEQ ID NO: 49773 - DNA, 50 bp, synthetic construct
  source 1..50: mol_type = other DNA
aactcaaacaatcaaaaaacaaattaaaccaaaccaaaccaaaaaaaaca

SEQ ID NO: 49774 - DNA, 50 bp, synthetic construct
  source 1..50: mol_type = other DNA
aactcaaacgatcaaaaaacgaattaaaccaaaccgaaccaaaaaaaacg

SEQ ID NO: 49775 - DNA, 50 bp, synthetic construct
  source 1..50: mol_type = other DNA
caaactacacaaattcctaaacaaatacacaaaaaacaaaataaaaaaca

SEQ ID NO: 49776 - DNA, 50 bp, synthetic construct
  source 1..50: mol_type = other DNA
cgaactacgcgaattcctaaacaaatacgcaaaaaacaaaataaaaaacg

SEQ ID NO: 49777 - DNA, 50 bp, synthetic construct
  source 1..50: mol_type = other DNA
catctatcctacaaccaaataaacctaaacatattacacaaaacaataca

SEQ ID NO: 49778 - DNA, 50 bp, synthetic construct
  source 1..50: mol_type = other DNA
catctatcctacgaccgaataaacctaaacgtattacgcgaaacgatacg

SEQ ID NO: 49779 - DNA, 50 bp, synthetic construct
  source 1..50: mol_type = other DNA
taaaacaaaaaataataaaacaaaataacaactcatctatcctacaacca

SEQ ID NO: 49780 - DNA, 50 bp, synthetic construct
  source 1..50: mol_type = other DNA
taaaacaaaaaataataaaacaaaataacgactcatctatcctacgaccg

SEQ ID NO: 49781 - DNA, 50 bp, synthetic construct
  source 1..50: mol_type = other DNA
cactaaaaccaaactaaataaaacccaaacccaacaaattccaatttcca

SEQ ID NO: 49782 - DNA, 50 bp, synthetic construct
  source 1..50: mol_type = other DNA
cactaaaaccaaactaaataaaacccgaacccaacaaattccgatttccg

SEQ ID NO: 49783 - DNA, 50 bp, synthetic construct
  source 1..50: mol_type = other DNA
caaactctaaaacacactctaaatcttaacaaaaatctaaataaccacca

SEQ ID NO: 49784 - DNA, 50 bp, synthetic construct
  source 1..50: mol_type = other DNA
caaactctaaaacgcgctctaaatcttaacgaaaatctaaataaccaccg

SEQ ID NO: 49785 - DNA, 50 bp, synthetic construct
  source 1..50: mol_type = other DNA
accctaatatccacctctttcttctaccccaataattattcaaattctca

SEQ ID NO: 49786 - DNA, 50 bp, synthetic construct
  source 1..50: mol_type = other DNA
accctaatatccgcctctttcttctaccccgataattattcaaattctcg

SEQ ID NO: 49787 - DNA, 50 bp, synthetic construct
  source 1..50: mol_type = other DNA
tttcttctaccccaataattattcaaattctcaccaaaacccaaaacaca

SEQ ID NO: 49788 - DNA, 50 bp, synthetic construct
  source 1..50: mol_type = other DNA
tttcttctaccccgataattattcaaattctcgccaaaacccaaaacgcg

SEQ ID NO: 49789 - DNA, 50 bp, synthetic construct
  source 1..50: mol_type = other DNA
tcatcaaacactaaaaaacaattttaaaaatctaaaataaaccaaacaca

SEQ ID NO: 49790 - DNA, 50 bp, synthetic construct
  source 1..50: mol_type = other DNA
tcgtcgaacgctaaaaaacgattttaaaaatctaaaataaaccgaacgcg

SEQ ID NO: 49791 - DNA, 50 bp, synthetic construct
  source 1..50: mol_type = other DNA
taaaacaatcactcctacctcaacctcttaaaatattaaaattacaaaca

SEQ ID NO: 49792 - DNA, 50 bp, synthetic construct
  source 1..50: mol_type = other DNA
taaaacgatcactcctacctcgacctcttaaaatattaaaattacaaacg

SEQ ID NO: 49793 - DNA, 50 bp, synthetic construct
  source 1..50: mol_type = other DNA
aaaataatcacttcaaaccaaaaatttaaaaccaacctaaacaaacttca

SEQ ID NO: 49794 - DNA, 50 bp, synthetic construct
  source 1..50: mol_type = other DNA
aaaataatcgcttcaaaccgaaaatttaaaaccaacctaaacaaacttcg

SEQ ID NO: 49795 - DNA, 50 bp, synthetic construct
  source 1..50: mol_type = other DNA
taaatactacctaaacaacacaacccaatcctcacctaacaatattaaca

SEQ ID NO: 49796 - DNA, 50 bp, synthetic construct
  source 1..50: mol_type = other DNA
taaatactacctaaacaacacaacccgatcctcacctaacgatattaacg

SEQ ID NO: 49797 - DNA, 50 bp, synthetic construct
  source 1..50: mol_type = other DNA
taaatacaaaaaaacactataaaaaataaaaacaaccctcaccaacacca

SEQ ID NO: 49798 - DNA, 50 bp, synthetic construct
  source 1..50: mol_type = other DNA
taaatacaaaaaaacactataaaaaataaaaacaaccctcgccaacaccg

SEQ ID NO: 49799 - DNA, 50 bp, synthetic construct
  source 1..50: mol_type = other DNA
ataatatacaaacaaaacaaaaatacatataaatcatcattccataatca

SEQ ID NO: 49800 - DNA, 50 bp, synthetic construct
  source 1..50: mol_type = other DNA
ataatatacaaacaaaacaaaaatacgtataaatcatcattccgtaatcg

SEQ ID NO: 49801 - DNA, 50 bp, synthetic construct
  source 1..50: mol_type = other DNA
aaaaaaactaaaaataaccaaatcactctcaaatttccaaaatcacacca

SEQ ID NO: 49802 - DNA, 50 bp, synthetic construct
  source 1..50: mol_type = other DNA
aaaaaaactaaaaataaccaaatcgctctcgaatttccgaaatcacaccg

SEQ ID NO: 49803 - DNA, 50 bp, synthetic construct
  source 1..50: mol_type = other DNA
cacaataaaaaattcaaattaccaaacaacaatataatttcaaaaaccca

SEQ ID NO: 49804 - DNA, 50 bp, synthetic construct
  source 1..50: mol_type = other DNA
cgcgataaaaaattcgaattaccgaacaacgatataatttcgaaaacccg

SEQ ID NO: 49805 - DNA, 50 bp, synthetic construct
  source 1..50: mol_type = other DNA
aaaaaattcaaattaccaaacaacaatataatttcaaaaacccaaaaaca

SEQ ID NO: 49806 - DNA, 50 bp, synthetic construct
  source 1..50: mol_type = other DNA
aaaaaattcgaattaccgaacaacgatataatttcgaaaacccgaaaacg

SEQ ID NO: 49807 - DNA, 50 bp, synthetic construct
  source 1..50: mol_type = other DNA
aacacctaaaacaacacaaaaacaaaaaatccaaactccatcttaaaaca

SEQ ID NO: 49808 - DNA, 50 bp, synthetic construct
  source 1..50: mol_type = other DNA
gacgcctaaaacgacgcaaaaacaaaaaatccaaactccatcttaaaacg

SEQ ID NO: 49809 - DNA, 50 bp, synthetic construct
  source 1..50: mol_type = other DNA
cctaaaacaacacaaaaacaaaaaatccaaactccatcttaaaacaaaca

SEQ ID NO: 49810 - DNA, 50 bp, synthetic construct
  source 1..50: mol_type = other DNA
cctaaaacgacgcaaaaacaaaaaatccaaactccatcttaaaacgaacg

SEQ ID NO: 49811 - DNA, 50 bp, synthetic construct
  source 1..50: mol_type = other DNA
acacaaaaacaaaaaatccaaactccatcttaaaacaaacaaaaaaaaca

SEQ ID NO: 49812 - DNA, 50 bp, synthetic construct
  source 1..50: mol_type = other DNA
acgcaaaaacaaaaaatccaaactccatcttaaaacgaacgaaaaaaacg

SEQ ID NO: 49813 - DNA, 50 bp, synthetic construct
  source 1..50: mol_type = other DNA
ccaaaaaccaaaaatccctaaaaaactcctccaaaactaaaaaaataaca

SEQ ID NO: 49814 - DNA, 50 bp, synthetic construct
  source 1..50: mol_type = other DNA
ccgaaaaccgaaaatccctaaaaaactcctccgaaactaaaaaaataacg

SEQ ID NO: 49815 - DNA, 50 bp, synthetic construct
  source 1..50: mol_type = other DNA
aacaaataacaacaaccaacaacatccaaaaaaataaacaaaaaacaaca

SEQ ID NO: 49816 - DNA, 50 bp, synthetic construct
  source 1..50: mol_type = other DNA
aacaaataacgacgaccgacgacgtccgaaaaaataaacaaaaaacgacg

SEQ ID NO: 49817 - DNA, 50 bp, synthetic construct
  source 1..50: mol_type = other DNA
taaaacaaataacaacaaccaacaacatccaaaaaaataaacaaaaaaca

SEQ ID NO: 49818 - DNA, 50 bp, synthetic construct
  source 1..50: mol_type = other DNA
taaaacaaataacgacgaccgacgacgtccgaaaaaataaacaaaaaacg

SEQ ID NO: 49819 - DNA, 50 bp, synthetic construct
  source 1..50: mol_type = other DNA
acaaaaaataacataattaccactaattcctttaaattttaaaataaaca

SEQ ID NO: 49820 - DNA, 50 bp, synthetic construct
  source 1..50: mol_type = other DNA
acaaaaaataacgtaattaccactaattcctttaaattttaaaataaacg

SEQ ID NO: 49821 - DNA, 50 bp, synthetic construct
  source 1..50: mol_type = other DNA
acaaaaccccatctctactaaacatacaaaattaaccaaatataataaca

SEQ ID NO: 49822 - DNA, 50 bp, synthetic construct
  source 1..50: mol_type = other DNA
acgaaaccccgtctctactaaacatacaaaattaaccaaatataataacg

SEQ ID NO: 49823 - DNA, 50 bp, synthetic construct
  source 1..50: mol_type = other DNA
aacaaatcacctaaattcaaaaattcaaaaccaacccaacctaaaaaaca

SEQ ID NO: 49824 - DNA, 50 bp, synthetic construct
  source 1..50: mol_type = other DNA
aacgaatcacctaaattcaaaaattcgaaaccaacccgacctaaaaaacg

SEQ ID NO: 49825 - DNA, 50 bp, synthetic construct
  source 1..50: mol_type = other DNA
tttggttaattttgtatgtttagtagagatggggttttgttttttaggtt

SEQ ID NO: 49826 - DNA, 50 bp, synthetic construct
  source 1..50: mol_type = other DNA
tttggttaattttgtatgtttagtagagacggggtttcgttttttaggtc

SEQ ID NO: 49827 - DNA, 50 bp, synthetic construct
  source 1..50: mol_type = other DNA
ttcaccctttaaaccaaactaatctcaaactcctaaactcaaataatcca

SEQ ID NO: 49828 - DNA, 50 bp, synthetic construct
  source 1..50: mol_type = other DNA
ttcgccctttaaaccgaactaatctcgaactcctaaactcaaataatccg

SEQ ID NO: 49829 - DNA, 50 bp, synthetic construct
  source 1..50: mol_type = other DNA
aaaataccaactacttaaacacaaaatcaatttttataccaaaacaaaca

SEQ ID NO: 49830 - DNA, 50 bp, synthetic construct
  source 1..50: mol_type = other DNA
aaaataccgactacttaaacgcgaaatcgatttttataccgaaacaaacg

SEQ ID NO: 49831 - DNA, 50 bp, synthetic construct
  source 1..50: mol_type = other DNA
ataaataataaaataccaactacttaaacacaaaatcaatttttatacca

SEQ ID NO: 49832 - DNA, 50 bp, synthetic construct
  source 1..50: mol_type = other DNA
ataaataataaaataccgactacttaaacgcgaaatcgatttttataccg

SEQ ID NO: 49833 - DNA, 50 bp, synthetic construct
  source 1..50: mol_type = other DNA
aaatactttctatcacccaccaacaaaccaaaaatctaaaattcaaaaca

SEQ ID NO: 49834 - DNA, 50 bp, synthetic construct
  source 1..50: mol_type = other DNA
aaatactttctatcacccgccgacgaaccgaaaatctaaaattcgaaacg

SEQ ID NO: 49835 - DNA, 50 bp, synthetic construct
  source 1..50: mol_type = other DNA
attccaaatactttctatcacccaccaacaaaccaaaaatctaaaattca

SEQ ID NO: 49836 - DNA, 50 bp, synthetic construct
  source 1..50: mol_type = other DNA
attccaaatactttctatcacccgccgacgaaccgaaaatctaaaattcg

SEQ ID NO: 49837 - DNA, 50 bp, synthetic construct
  source 1..50: mol_type = other DNA
aaaattccaaaaaaaccaaaattccaaatactttctatcacccaccaaca

SEQ ID NO: 49838 - DNA, 50 bp, synthetic construct
  source 1..50: mol_type = other DNA
aaaattccaaaaaaaccaaaattccaaatactttctatcacccgccgacg

SEQ ID NO: 49839 - DNA, 50 bp, synthetic construct
  source 1..50: mol_type = other DNA
acaaaaattccaaaaaaaccaaaattccaaatactttctatcacccacca

SEQ ID NO: 49840 - DNA, 50 bp, synthetic construct
  source 1..50: mol_type = other DNA
acgaaaattccaaaaaaaccaaaattccaaatactttctatcacccgccg

SEQ ID NO: 49841 - DNA, 50 bp, synthetic construct
  source 1..50: mol_type = other DNA
tcacccaaatataaaaccaaaacaacaccaaacataaaaccaaaacaaca

SEQ ID NO: 49842 - DNA, 50 bp, synthetic construct
  source 1..50: mol_type = other DNA
tcacccgaatataaaaccgaaacaacgccaaacgtaaaaccgaaacaacg

SEQ ID NO: 49843 - DNA, 50 bp, synthetic construct
  source 1..50: mol_type = other DNA
attttaacaatctaaaactcttcaaaccattcaaccacccaaaaaaatca

SEQ ID NO: 49844 - DNA, 50 bp, synthetic construct
  source 1..50: mol_type = other DNA
attttaacgatctaaaactcttcgaaccgttcgaccacccaaaaaaatcg

SEQ ID NO: 49845 - DNA, 50 bp, synthetic construct
  source 1..50: mol_type = other DNA
aataatcaaacaactcaaaaaactctaaatcaccaaaatacacctctaca

SEQ ID NO: 49846 - DNA, 50 bp, synthetic construct
  source 1..50: mol_type = other DNA
aataatcgaacgactcgaaaaactctaaatcgccaaaatacacctctacg

SEQ ID NO: 49847 - DNA, 50 bp, synthetic construct
  source 1..50: mol_type = other DNA
ttggtattataggtgtgagttattttgttttgtttttagattgttttagt

SEQ ID NO: 49848 - DNA, 50 bp, synthetic construct
  source 1..50: mol_type = other DNA
ttggtattataggtgtgagttatttcgttttgtttttagattgttttagc

SEQ ID NO: 49849 - DNA, 50 bp, synthetic construct
  source 1..50: mol_type = other DNA
tcccacctctacctcccaaataattaatattacaaatataaaccacccca

SEQ ID NO: 49850 - DNA, 50 bp, synthetic construct
  source 1..50: mol_type = other DNA
tcccacctctacctcccgaataattaatattacaaatataaaccaccccg

SEQ ID NO: 49851 - DNA, 50 bp, synthetic construct
  source 1..50: mol_type = other DNA
aaactcaaaccctcccacctcaacttaccaaatacttaaaactacaatca

SEQ ID NO: 49852 - DNA, 50 bp, synthetic construct
  source 1..50: mol_type = other DNA
aaactcaaaccctcccgcctcaacttaccgaatacttaaaactacaatcg

SEQ ID NO: 49853 - DNA, 50 bp, synthetic construct
  source 1..50: mol_type = other DNA
aataaatatttaaattcactttttaaaatactaaaacccaaccaaacaca

SEQ ID NO: 49854 - DNA, 50 bp, synthetic construct
  source 1..50: mol_type = other DNA
aataaatatttaaattcactttttaaaatactaaaacccgaccgaacgcg

SEQ ID NO: 49855 - DNA, 50 bp, synthetic construct
  source 1..50: mol_type = other DNA
caacaccattttatctacacacatacacacaaacaaaattctaaaaacca

SEQ ID NO: 49856 - DNA, 50 bp, synthetic construct
  source 1..50: mol_type = other DNA
cgacgccattttatctacacacatacacacgaacaaaattctaaaaaccg

SEQ ID NO: 49857 - DNA, 50 bp, synthetic construct
  source 1..50: mol_type = other DNA
cctaactttaaactcaaattcaatacctaccaccataattcaaaatccca

SEQ ID NO: 49858 - DNA, 50 bp, synthetic construct
  source 1..50: mol_type = other DNA
cctaactttaaactcaaattcgatacctaccgccataattcaaaatcccg

SEQ ID NO: 49859 - DNA, 50 bp, synthetic construct
  source 1..50: mol_type = other DNA
actttaaactcaaattcaatacctaccaccataattcaaaatcccaacca

SEQ ID NO: 49860 - DNA, 50 bp, synthetic construct
  source 1..50: mol_type = other DNA
actttaaactcaaattcgatacctaccgccataattcaaaatcccgaccg

SEQ ID NO: 49861 - DNA, 50 bp, synthetic construct
  source 1..50: mol_type = other DNA
caaaacttcaaaacaaccaatactattaaaaacaacaaataaaaacacca

SEQ ID NO: 49862 - DNA, 50 bp, synthetic construct
  source 1..50: mol_type = other DNA
cgaaacttcgaaacgaccgatactattaaaaacgacaaataaaaacgccg

SEQ ID NO: 49863 - DNA, 50 bp, synthetic construct
  source 1..50: mol_type = other DNA
aaacaaaacttcaaaacaaccaatactattaaaaacaacaaataaaaaca

SEQ ID NO: 49864 - DNA, 50 bp, synthetic construct
  source 1..50: mol_type = other DNA
aaacgaaacttcgaaacgaccgatactattaaaaacgacaaataaaaacg

SEQ ID NO: 49865 - DNA, 50 bp, synthetic construct
  source 1..50: mol_type = other DNA
acaatttaatctaaaacaaaacttcaaaacaaccaatactattaaaaaca

SEQ ID NO: 49866 - DNA, 50 bp, synthetic construct
  source 1..50: mol_type = other DNA
acgatttaatctaaaacgaaacttcgaaacgaccgatactattaaaaacg

SEQ ID NO: 49867 - DNA, 50 bp, synthetic construct
  source 1..50: mol_type = other DNA
atataaaaaccataaaaaaaacaaaaccaaaaatacacccccaaaataca

SEQ ID NO: 49868 - DNA, 50 bp, synthetic construct
  source 1..50: mol_type = other DNA
atataaaaaccgtaaaaaaaacgaaaccaaaaatacacccccgaaatacg

SEQ ID NO: 49869 - DNA, 50 bp, synthetic construct
  source 1..50: mol_type = other DNA
aaatattcctctttaatttcttcaattacaaataaaaacaaaaaactaca

SEQ ID NO: 49870 - DNA, 50 bp, synthetic construct
  source 1..50: mol_type = other DNA
aaatattcctctttaatttcttcaattacaaataaaaacgaaaaactacg

SEQ ID NO: 49871 - DNA, 50 bp, synthetic construct
  source 1..50: mol_type = other DNA
acttatcaattaaacctccatacttaaacactctccactaaacatcacca

SEQ ID NO: 49872 - DNA, 50 bp, synthetic construct
  source 1..50: mol_type = other DNA
acttatcaattaaacctccatacttaaacgctctccgctaaacatcgccg

SEQ ID NO: 49873 - DNA, 50 bp, synthetic construct
  source 1..50: mol_type = other DNA
tgttatgtttgtaggtgtaatttagggatgtggaatatatggatattgat

SEQ ID NO: 49874 - DNA, 50 bp, synthetic construct
  source 1..50: mol_type = other DNA
tgttatgtttgtaggtgtaatttagggatgtggaatatatggatattgac

SEQ ID NO: 49875 - DNA, 50 bp, synthetic construct
  source 1..50: mol_type = other DNA
aaacctaaaacaactaaaaatccaacatttaaccaaaatcccaaaaaaca

SEQ ID NO: 49876 - DNA, 50 bp, synthetic construct
  source 1..50: mol_type = other DNA
aaacctaaaacgactaaaaatccgacgtttaaccgaaatcccgaaaaacg

SEQ ID NO: 49877 - DNA, 50 bp, synthetic construct
  source 1..50: mol_type = other DNA
aatggatttagggaagagatttatatgttttggttaatatttgtgttttt

SEQ ID NO: 49878 - DNA, 50 bp, synthetic construct
  source 1..50: mol_type = other DNA
aatggatttagggaagagatttatacgttttggttaatatttgtgttttc

SEQ ID NO: 49879 - DNA, 50 bp, synthetic construct
  source 1..50: mol_type = other DNA
atacctctaccccacaaataaaaaaatacacattcctcctaattccttca

SEQ ID NO: 49880 - DNA, 50 bp, synthetic construct
  source 1..50: mol_type = other DNA
gtacctctaccccacgaataaaaaaatacacgttcctcctaattccttcg

SEQ ID NO: 49881 - DNA, 50 bp, synthetic construct
  source 1..50: mol_type = other DNA
aatggatttagggaagagatttatatgttttggttagtatttgtgttttt

SEQ ID NO: 49882 - DNA, 50 bp, synthetic construct
  source 1..50: mol_type = other DNA
aatggatttagggaagagatttatatgttttggttagtatttgtgttttc

SEQ ID NO: 49883 - DNA, 50 bp, synthetic construct
  source 1..50: mol_type = other DNA
ttacccaaactataatacaataacatcatctcaactcaccacaacctcca

SEQ ID NO: 49884 - DNA, 50 bp, synthetic construct
  source 1..50: mol_type = other DNA
ttacccaaactataatacaataacgtcatctcaactcaccgcaacctccg

SEQ ID NO: 49885 - DNA, 50 bp, synthetic construct
  source 1..50: mol_type = other DNA
tccatcaaaaacaccaaaatccaacaaaactaccctttaaaatctaccca

SEQ ID NO: 49886 - DNA, 50 bp, synthetic construct
  source 1..50: mol_type = other DNA
tccatcgaaaacaccaaaatccaacgaaactaccctttaaaatctacccg

SEQ ID NO: 49887 - DNA, 50 bp, synthetic construct
  source 1..50: mol_type = other DNA
ctatacaataaaaaaaccaaaaattccatcaaaaacaccaaaatccaaca

SEQ ID NO: 49888 - DNA, 50 bp, synthetic construct
  source 1..50: mol_type = other DNA
ctatacaataaaaaaaccgaaaattccatcgaaaacaccaaaatccaacg

SEQ ID NO: 49889 - DNA, 50 bp, synthetic construct
  source 1..50: mol_type = other DNA
ataaatcactcccatacaaaaaaattacaaccaaataaaacatttaatca

SEQ ID NO: 49890 - DNA, 50 bp, synthetic construct
  source 1..50: mol_type = other DNA
ataaatcactcccgtacgaaaaaattacaaccgaataaaacgtttaatcg

SEQ ID NO: 49891 - DNA, 50 bp, synthetic construct
  source 1..50: mol_type = other DNA
acataatattaaaatacaaccaaacactctatccaactacaatctcccca

SEQ ID NO: 49892 - DNA, 50 bp, synthetic construct
  source 1..50: mol_type = other DNA
acataatattaaaatacgaccaaacgctctatccgactacaatctccccg

SEQ ID NO: 49893 - DNA, 50 bp, synthetic construct
  source 1..50: mol_type = other DNA
caaacaaccctaaccaaaaaaacaaattacatatattaattcaactaaca

SEQ ID NO: 49894 - DNA, 50 bp, synthetic construct
  source 1..50: mol_type = other DNA
cgaacgaccctaaccgaaaaaacgaattacatatattaattcaactaacg

SEQ ID NO: 49895 - DNA, 50 bp, synthetic construct
  source 1..50: mol_type = other DNA
accctaaccaaaaaaacaaattacatatattaattcaactaacaataaca

SEQ ID NO: 49896 - DNA, 50 bp, synthetic construct
  source 1..50: mol_type = other DNA
accctaaccgaaaaaacgaattacatatattaattcaactaacgataacg

SEQ ID NO: 49897 - DNA, 50 bp, synthetic construct
  source 1..50: mol_type = other DNA
acaaattacatatattaattcaactaacaataacaacaaaaacaaaacca

SEQ ID NO: 49898 - DNA, 50 bp, synthetic construct
  source 1..50: mol_type = other DNA
acgaattacatatattaattcaactaacgataacgacgaaaacgaaaccg

SEQ ID NO: 49899 - DNA, 50 bp, synthetic construct
  source 1..50: mol_type = other DNA
aattacatatattaattcaactaacaataacaacaaaaacaaaaccaaca

SEQ ID NO: 49900 - DNA, 50 bp, synthetic construct
  source 1..50: mol_type = other DNA
aattacatatattaattcaactaacgataacgacgaaaacgaaaccgacg

SEQ ID NO: 49901 - DNA, 50 bp, synthetic construct
  source 1..50: mol_type = other DNA
ttaattcaactaacaataacaacaaaaacaaaaccaacaaaacctataca

SEQ ID NO: 49902 - DNA, 50 bp, synthetic construct
  source 1..50: mol_type = other DNA
ttaattcaactaacgataacgacgaaaacgaaaccgacgaaacctatacg

SEQ ID NO: 49903 - DNA, 50 bp, synthetic construct
  source 1..50: mol_type = other DNA
ctcaatactcttacattctacactcattttctctcctcatccttcttaca

SEQ ID NO: 49904 - DNA, 50 bp, synthetic construct
  source 1..50: mol_type = other DNA
ctcaatactcttacattctacgctcgttttctctcctcatccttcttacg

SEQ ID NO: 49905 - DNA, 50 bp, synthetic construct
  source 1..50: mol_type = other DNA
aataaatcatcaaaaaaacccaaaatacaaaatataaaaacaactaaaca

SEQ ID NO: 49906 - DNA, 50 bp, synthetic construct
  source 1..50: mol_type = other DNA
aataaatcatcgaaaaaacccgaaatacaaaatataaaaacaactaaacg

SEQ ID NO: 49907 - DNA, 50 bp, synthetic construct
  source 1..50: mol_type = other DNA
ccaaaactatttcaaatctattattaaataaaaaatacaaactacattca

SEQ ID NO: 49908 - DNA, 50 bp, synthetic construct
  source 1..50: mol_type = other DNA
ccaaaactatttcaaatctattattaaataaaaaatacaaactacattcg

SEQ ID NO: 49909 - DNA, 50 bp, synthetic construct
  source 1..50: mol_type = other DNA
aaattcataaatatttcctccacccccaaaaaaacccaatataaacaaca

SEQ ID NO: 49910 - DNA, 50 bp, synthetic construct
  source 1..50: mol_type = other DNA
aaattcataaatatttcctccgcccccgaaaaaacccgatataaacgacg

SEQ ID NO: 49911 - DNA, 50 bp, synthetic construct
  source 1..50: mol_type = other DNA
aaaactaccaaaaaattcataaatatttcctccacccccaaaaaaaccca

SEQ ID NO: 49912 - DNA, 50 bp, synthetic construct
  source 1..50: mol_type = other DNA
aaaactaccgaaaaattcataaatatttcctccgcccccgaaaaaacccg

SEQ ID NO: 49913 - DNA, 50 bp, synthetic construct
  source 1..50: mol_type = other DNA
ctaacacccaacaaaaaaaactaccaaaaaattcataaatatttcctcca

SEQ ID NO: 49914 - DNA, 50 bp, synthetic construct
  source 1..50: mol_type = other DNA
ctaacgcccgacaaaaaaaactaccgaaaaattcataaatatttcctccg

SEQ ID NO: 49915 - DNA, 50 bp, synthetic construct
  source 1..50: mol_type = other DNA
cattcttaaaaaacaataaatttcaaccaatatacaccattcccacaaca

SEQ ID NO: 49916 - DNA, 50 bp, synthetic construct
  source 1..50: mol_type = other DNA
cgttcttaaaaaacaataaatttcgaccaatatacaccgttcccgcgacg

SEQ ID NO: 49917 - DNA, 50 bp, synthetic construct
  source 1..50: mol_type = other DNA
caccattcttaaaaaacaataaatttcaaccaatatacaccattcccaca

SEQ ID NO: 49918 - DNA, 50 bp, synthetic construct
  source 1..50: mol_type = other DNA
caccgttcttaaaaaacaataaatttcgaccaatatacaccgttcccgcg

SEQ ID NO: 49919 - DNA, 50 bp, synthetic construct
  source 1..50: mol_type = other DNA
aaaaacaaaaaccaacaaaaaacaacacaaaaaatcaaaaaccccaatca

SEQ ID NO: 49920 - DNA, 50 bp, synthetic construct
  source 1..50: mol_type = other DNA
gaaaacaaaaaccgacaaaaaacgacacgaaaaatcgaaaaccccaatcg

SEQ ID NO: 49921 - DNA, 50 bp, synthetic construct
  source 1..50: mol_type = other DNA
cctaaactctcatactcccctcaaaaactttcctaaacactaaaataaca

SEQ ID NO: 49922 - DNA, 50 bp, synthetic construct
  source 1..50: mol_type = other DNA
cctaaactctcatactcccctcgaaaactttcctaaacgctaaaataacg

SEQ ID NO: 49923 - DNA, 50 bp, synthetic construct
  source 1..50: mol_type = other DNA
acaaaaaacaaacaactaaccaacacaaaaaaacaaccaaacaaccccca

SEQ ID NO: 49924 - DNA, 50 bp, synthetic construct
  source 1..50: mol_type = other DNA
acaaaaaacaaacaactaaccaacacgaaaaaacgaccaaacaacccccg

SEQ ID NO: 49925 - DNA, 50 bp, synthetic construct
  source 1..50: mol_type = other DNA
acattaaaaccttaaacctcaccaaacaataaaaaaataaatcaaaatca

SEQ ID NO: 49926 - DNA, 50 bp, synthetic construct
  source 1..50: mol_type = other DNA
gcattaaaaccttaaacctcgccaaacgataaaaaaataaatcaaaatcg

SEQ ID NO: 49927 - DNA, 50 bp, synthetic construct
  source 1..50: mol_type = other DNA
taaacatatcccaaaaactctataacctcctcccaactaacccttaaaca

SEQ ID NO: 49928 - DNA, 50 bp, synthetic construct
  source 1..50: mol_type = other DNA
taaacgtatcccaaaaactctataacctcctcccaactaacccttaaacg

SEQ ID NO: 49929 - DNA, 50 bp, synthetic construct
  source 1..50: mol_type = other DNA
atccttaaaacactttaaacaatccataaacccactacctccaaaaacca

SEQ ID NO: 49930 - DNA, 50 bp, synthetic construct
  source 1..50: mol_type = other DNA
atccttaaaacgctttaaacaatccgtaaacccgctacctccaaaaaccg

SEQ ID NO: 49931 - DNA, 50 bp, synthetic construct
  source 1..50: mol_type = other DNA
atacatatacactcatataaacacaccaaaaactataacaacaatcaaca

SEQ ID NO: 49932 - DNA, 50 bp, synthetic construct
  source 1..50: mol_type = other DNA
atacgtatacactcgtataaacgcaccaaaaactataacaacaatcaacg

SEQ ID NO: 49933 - DNA, 50 bp, synthetic construct
  source 1..50: mol_type = other DNA
aaaacactaatactaccaaaacacaaaacatcaaaacaactccatcccca

SEQ ID NO: 49934 - DNA, 50 bp, synthetic construct
  source 1..50: mol_type = other DNA
gaaacactaatactaccaaaacacaaaacatcaaaacgactccgtccccg

SEQ ID NO: 49935 - DNA, 50 bp, synthetic construct
  source 1..50: mol_type = other DNA
attacctacaaataactaacacacaatcttctaaatcacctcccactaca

SEQ ID NO: 49936 - DNA, 50 bp, synthetic construct
  source 1..50: mol_type = other DNA
attacctacgaataactaacacacgatcttctaaatcacctcccactacg

SEQ ID NO: 49937 - DNA, 50 bp, synthetic construct
  source 1..50: mol_type = other DNA
attaaaaccaaattaaacaaaacataaaaaataaacaaaactttatccca

SEQ ID NO: 49938 - DNA, 50 bp, synthetic construct
  source 1..50: mol_type = other DNA
attaaaaccgaattaaacaaaacataaaaaataaacaaaactttatcccg

SEQ ID NO: 49939 - DNA, 50 bp, synthetic construct
  source 1..50: mol_type = other DNA
aaaataaaaaactctaatctaaaaaaaactatttccctaaaacatattca

SEQ ID NO: 49940 - DNA, 50 bp, synthetic construct
  source 1..50: mol_type = other DNA
aaaataaaaaactctaatctaaaaaaaactatttccctaaaacgtattcg

SEQ ID NO: 49941 - DNA, 50 bp, synthetic construct
  source 1..50: mol_type = other DNA
aactaaaaataaaaacacttaaaacaaaatacaaaaaccaaaaaaccaca

SEQ ID NO: 49942 - DNA, 50 bp, synthetic construct
  source 1..50: mol_type = other DNA
aactaaaaataaaaacgcttaaaacgaaatacgaaaaccaaaaaaccgcg

SEQ ID NO: 49943 - DNA, 50 bp, synthetic construct
  source 1..50: mol_type = other DNA
taaactaaaaataaaaacacttaaaacaaaatacaaaaaccaaaaaacca

SEQ ID NO: 49944 - DNA, 50 bp, synthetic construct
  source 1..50: mol_type = other DNA
taaactaaaaataaaaacgcttaaaacgaaatacgaaaaccaaaaaaccg

SEQ ID NO: 49945 - DNA, 50 bp, synthetic construct
  source 1..50: mol_type = other DNA
accacaacacctccaatcatattaaaaaaactaaactaaaaataaaaaca

SEQ ID NO: 49946 - DNA, 50 bp, synthetic construct
  source 1..50: mol_type = other DNA
accgcgacgcctccgatcgtattaaaaaaactaaactaaaaataaaaacg

SEQ ID NO: 49947 - DNA, 50 bp, synthetic construct
  source 1..50: mol_type = other DNA
actaaacttaaaacaacaactataaaacctcaaacaaaattcactcctca

SEQ ID NO: 49948 - DNA, 50 bp, synthetic construct
  source 1..50: mol_type = other DNA
actaaacttaaaacgacgactataaaacctcgaacgaaattcgctcctcg

SEQ ID NO: 49949 - DNA, 50 bp, synthetic construct
  source 1..50: mol_type = other DNA
ataaaaaaaataaaccaaactaaacttaaaacaacaactataaaacctca

SEQ ID NO: 49950 - DNA, 50 bp, synthetic construct
  source 1..50: mol_type = other DNA
ataaaaaaaataaaccgaactaaacttaaaacgacgactataaaacctcg

SEQ ID NO: 49951 - DNA, 50 bp, synthetic construct
  source 1..50: mol_type = other DNA
tcacaaactacaaaaacttccttcccactacctattttccttaaatcaca

SEQ ID NO: 49952 - DNA, 50 bp, synthetic construct
  source 1..50: mol_type = other DNA
tcacaaactacgaaaacttccttcccactacctattttccttaaatcgcg

SEQ ID NO: 49953 - DNA, 50 bp, synthetic construct
  source 1..50: mol_type = other DNA
aaccaccataccttaataaaaactacaaaaacaccccctaccaacaaaca

SEQ ID NO: 49954 - DNA, 50 bp, synthetic construct
  source 1..50: mol_type = other DNA
aaccaccgtaccttaataaaaactacaaaaacaccccctaccaacaaacg

SEQ ID NO: 49955 - DNA, 50 bp, synthetic construct
  source 1..50: mol_type = other DNA
ctttctcatctcaataaaaacaataaaaaaactcataaccaaaaacttca

SEQ ID NO: 49956 - DNA, 50 bp, synthetic construct
  source 1..50: mol_type = other DNA
ctttctcatctcaataaaaacgataaaaaaactcgtaaccaaaaacttcg

SEQ ID NO: 49957 - DNA, 50 bp, synthetic construct
  source 1..50: mol_type = other DNA
aaccataaaccaaatttaacctcaccctcctcctacttcctaaataaaca

SEQ ID NO: 49958 - DNA, 50 bp, synthetic construct
  source 1..50: mol_type = other DNA
aaccgtaaaccaaatttaacctcaccctcctcctacttcctaaataaacg

SEQ ID NO: 49959 - DNA, 50 bp, synthetic construct
  source 1..50: mol_type = other DNA
atatatatataaaaataatacaaacccactataataccatcacaaaccca

SEQ ID NO: 49960 - DNA, 50 bp, synthetic construct
  source 1..50: mol_type = other DNA
atatatatataaaaataatacgaacccgctataataccatcgcgaacccg

SEQ ID NO: 49961 - DNA, 50 bp, synthetic construct
  source 1..50: mol_type = other DNA
accctaaattaaaacatacctaatatatatataaaaataatacaaaccca

SEQ ID NO: 49962 - DNA, 50 bp, synthetic construct
  source 1..50: mol_type = other DNA
accctaaattaaaacgtacctaatatatatataaaaataatacgaacccg

SEQ ID NO: 49963 - DNA, 50 bp, synthetic construct
  source 1..50: mol_type = other DNA
ctattacctaacaccaaataaactctaaaaaaaaacacacaacaaactca

SEQ ID NO: 49964 - DNA, 50 bp, synthetic construct
  source 1..50: mol_type = other DNA
ctattacctaacaccaaataaactctaaaaaaaaacgcgcaacaaactcg

SEQ ID NO: 49965 - DNA, 50 bp, synthetic construct
  source 1..50: mol_type = other DNA
aactctaaaaaaaaacacacaacaaactcaaatctaaaatacaatttcca

SEQ ID NO: 49966 - DNA, 50 bp, synthetic construct
  source 1..50: mol_type = other DNA
aactctaaaaaaaaacgcgcaacaaactcgaatctaaaatacaatttccg

SEQ ID NO: 49967 - DNA, 50 bp, synthetic construct
  source 1..50: mol_type = other DNA
ctctaaaaaaaaacacacaacaaactcaaatctaaaatacaatttccaca

SEQ ID NO: 49968 - DNA, 50 bp, synthetic construct
  source 1..50: mol_type = other DNA
ctctaaaaaaaaacgcgcaacaaactcgaatctaaaatacaatttccgcg

SEQ ID NO: 49969 - DNA, 50 bp, synthetic construct
  source 1..50: mol_type = other DNA
aactcaaatctaaaatacaatttccacactactcattaaaaactacacca

SEQ ID NO: 49970 - DNA, 50 bp, synthetic construct
  source 1..50: mol_type = other DNA
aactcgaatctaaaatacaatttccgcgctactcattaaaaactacgccg

SEQ ID NO: 49971 - DNA, 50 bp, synthetic construct
  source 1..50: mol_type = other DNA
caaatctaaaatacaatttccacactactcattaaaaactacaccaaaca

SEQ ID NO: 49972 - DNA, 50 bp, synthetic construct
  source 1..50: mol_type = other DNA
cgaatctaaaatacaatttccgcgctactcattaaaaactacgccgaacg

SEQ ID NO: 49973 - DNA, 50 bp, synthetic construct
  source 1..50: mol_type = other DNA
attacctcaaattaccccaataaatatctccaccaaaacactccatctca

SEQ ID NO: 49974 - DNA, 50 bp, synthetic construct
  source 1..50: mol_type = other DNA
attacctcaaattaccccaataaatatctccaccaaaacgctccgtctcg

SEQ ID NO: 49975 - DNA, 50 bp, synthetic construct
  source 1..50: mol_type = other DNA
aaaaaaaaatactcctaaaccaaattaaaaccaacaacctcctcattcca

SEQ ID NO: 49976 - DNA, 50 bp, synthetic construct
  source 1..50: mol_type = other DNA
gaaaaaaaatactcctaaaccgaattaaaaccgacgacctcctcgttccg

SEQ ID NO: 49977 - DNA, 50 bp, synthetic construct
  source 1..50: mol_type = other DNA
tctacaaaaaaaaatactcctaaaccaaattaaaaccaacaacctcctca

SEQ ID NO: 49978 - DNA, 50 bp, synthetic construct
  source 1..50: mol_type = other DNA
tctacgaaaaaaaatactcctaaaccgaattaaaaccgacgacctcctcg

SEQ ID NO: 49979 - DNA, 50 bp, synthetic construct
  source 1..50: mol_type = other DNA
aaaaaacaatctacaaaaaaaaatactcctaaaccaaattaaaaccaaca

SEQ ID NO: 49980 - DNA, 50 bp, synthetic construct
  source 1..50: mol_type = other DNA
aaaaaacgatctacgaaaaaaaatactcctaaaccgaattaaaaccgacg

SEQ ID NO: 49981 - DNA, 50 bp, synthetic construct
  source 1..50: mol_type = other DNA
aaacacacctcaccaaaaaacaatctacaaaaaaaaatactcctaaacca

SEQ ID NO: 49982 - DNA, 50 bp, synthetic construct
  source 1..50: mol_type = other DNA
aaacgcacctcgccaaaaaacgatctacgaaaaaaaatactcctaaaccg

SEQ ID NO: 49983 - DNA, 50 bp, synthetic construct
  source 1..50: mol_type = other DNA
tcctaacaaaatacatcttcatccttttccacccttaaaaacttaaaaca

SEQ ID NO: 49984 - DNA, 50 bp, synthetic construct
  source 1..50: mol_type = other DNA
tcctaacgaaatacgtcttcgtccttttccgcccttaaaaacttaaaacg

SEQ ID NO: 49985 - DNA, 50 bp, synthetic construct
  source 1..50: mol_type = other DNA
tacttctacaccaataacttatacataacacactataaactacacataca

SEQ ID NO: 49986 - DNA, 50 bp, synthetic construct
  source 1..50: mol_type = other DNA
tacttctacaccgataacttatacgtaacgcgctataaactacacgtacg

SEQ ID NO: 49987 - DNA, 50 bp, synthetic construct
  source 1..50: mol_type = other DNA
acacaacttcaacaaacacaaacataaaaaactacaaaactcaaaaacca

SEQ ID NO: 49988 - DNA, 50 bp, synthetic construct
  source 1..50: mol_type = other DNA
acgcaacttcgacaaacacaaacgtaaaaaactacgaaactcgaaaaccg

SEQ ID NO: 49989 - DNA, 50 bp, synthetic construct
  source 1..50: mol_type = other DNA
aaaaacttccaaccaaaacactacacaaaaaactaaccaactaaaaaaca

SEQ ID NO: 49990 - DNA, 50 bp, synthetic construct
  source 1..50: mol_type = other DNA
aaaaacttccgaccgaaacgctacgcgaaaaactaaccgactaaaaaacg

SEQ ID NO: 49991 - DNA, 50 bp, synthetic construct
  source 1..50: mol_type = other DNA
caaaacaatcaaaataaaaacaaaacaaccccaaaaacccccttaaaaca

SEQ ID NO: 49992 - DNA, 50 bp, synthetic construct
  source 1..50: mol_type = other DNA
caaaacgatcgaaataaaaacgaaacaaccccgaaaacccccttaaaacg

SEQ ID NO: 49993 - DNA, 50 bp, synthetic construct
  source 1..50: mol_type = other DNA
caaccaattcccaaaaatttaaaaccaaatacacaaacataaaacctcca

SEQ ID NO: 49994 - DNA, 50 bp, synthetic construct
  source 1..50: mol_type = other DNA
cgaccaattcccaaaaatttaaaaccgaatacgcaaacgtaaaacctccg

SEQ ID NO: 49995 - DNA, 50 bp, synthetic construct
  source 1..50: mol_type = other DNA
attcccaaaaatttaaaaccaaatacacaaacataaaacctccaaacaca

SEQ ID NO: 49996 - DNA, 50 bp, synthetic construct
  source 1..50: mol_type = other DNA
attcccaaaaatttaaaaccgaatacgcaaacgtaaaacctccgaacacg

SEQ ID NO: 49997 - DNA, 50 bp, synthetic construct
  source 1..50: mol_type = other DNA
attcaaaaaaaaacataataaaaaaccctataattcaaacaaaccccaca

SEQ ID NO: 49998 - DNA, 50 bp, synthetic construct
  source 1..50: mol_type = other DNA
attcaaaaaaaaacgtaataaaaaaccctataattcaaacaaaccccacg

SEQ ID NO: 49999 - DNA, 50 bp, synthetic construct
  source 1..50: mol_type = other DNA
aaaaacctaaaccaccaataactccaacctataaaaatataaaaaactca

SEQ ID NO: 50000 - DNA, 50 bp, synthetic construct
  source 1..50: mol_type = other DNA
aaaaacctaaaccgccgataactccaacctataaaaatataaaaaactcg

SEQ ID NO: 50001 - DNA, 50 bp, synthetic construct
  source 1..50: mol_type = other DNA
atataacttcacataataataacttaacttaaaaaaaaccacaaaaaaca

SEQ ID NO: 50002 - DNA, 50 bp, synthetic construct
  source 1..50: mol_type = other DNA
atataacttcacgtaataataacttaacttaaaaaaaaccgcaaaaaacg

SEQ ID NO: 50003 - DNA, 50 bp, synthetic construct
  source 1..50: mol_type = other DNA
ccaccctcctatatcctttctcaacaactactctaaaatataacttcaca

SEQ ID NO: 50004 - DNA, 50 bp, synthetic construct
  source 1..50: mol_type = other DNA
ccgccctcctatatcctttctcaacgactactctaaaatataacttcacg

SEQ ID NO: 50005 - DNA, 50 bp, synthetic construct
  source 1..50: mol_type = other DNA
tcaacaaaactatctcccactcactctacaactataaataccaaaaacca

SEQ ID NO: 50006 - DNA, 50 bp, synthetic construct
  source 1..50: mol_type = other DNA
tcgacaaaactatctcccactcgctctacaactataaataccaaaaaccg

SEQ ID NO: 50007 - DNA, 50 bp, synthetic construct
  source 1..50: mol_type = other DNA
aatatcataacaatcaaaaaacaaacataaacaataccaataccaaaaca

SEQ ID NO: 50008 - DNA, 50 bp, synthetic construct
  source 1..50: mol_type = other DNA
aatatcataacgatcgaaaaacaaacgtaaacaataccgataccaaaacg

SEQ ID NO: 50009 - DNA, 50 bp, synthetic construct
  source 1..50: mol_type = other DNA
caccaaaaacaaatatcataacaatcaaaaaacaaacataaacaatacca

SEQ ID NO: 50010 - DNA, 50 bp, synthetic construct
  source 1..50: mol_type = other DNA
cgccaaaaacaaatatcataacgatcgaaaaacaaacgtaaacaataccg

SEQ ID NO: 50011 - DNA, 50 bp, synthetic construct
  source 1..50: mol_type = other DNA
ttttttaaaataaaactattttaaaaatcacaataaccacaaatcaacca

SEQ ID NO: 50012 - DNA, 50 bp, synthetic construct
  source 1..50: mol_type = other DNA
ttttttaaaataaaactattttaaaaatcacaataaccgcaaatcgaccg

SEQ ID NO: 50013 - DNA, 50 bp, synthetic construct
  source 1..50: mol_type = other DNA
tcataatcctcttccaactactccctaaaataaaaaccaaaacaactaca

SEQ ID NO: 50014 - DNA, 50 bp, synthetic construct
  source 1..50: mol_type = other DNA
tcgtaatcctcttccaactactccctaaaataaaaaccgaaacgactacg

SEQ ID NO: 50015 - DNA, 50 bp, synthetic construct
  source 1..50: mol_type = other DNA
cctacataaaacctttcaacatctttccactcctaaactctccttaaaca

SEQ ID NO: 50016 - DNA, 50 bp, synthetic construct
  source 1..50: mol_type = other DNA
cctacgtaaaacctttcaacatctttccactcctaaactctccttaaacg

SEQ ID NO: 50017 - DNA, 50 bp, synthetic construct
  source 1..50: mol_type = other DNA
caattaaaccacacaaatatcactcaaaaacaccaaatctaaaaaaaaca

SEQ ID NO: 50018 - DNA, 50 bp, synthetic construct
  source 1..50: mol_type = other DNA
cgattaaaccgcgcgaatatcactcaaaaacgccgaatctaaaaaaaacg

SEQ ID NO: 50019 - DNA, 50 bp, synthetic construct
  source 1..50: mol_type = other DNA
aaatataaaataacaactaccaattaacctaaccccctcaaaacccttca

SEQ ID NO: 50020 - DNA, 50 bp, synthetic construct
  source 1..50: mol_type = other DNA
aaatataaaataacgactaccgattaacctaaccccctcgaaacccttcg

SEQ ID NO: 50021 - DNA, 50 bp, synthetic construct
  source 1..50: mol_type = other DNA
acaaccccttaaatataataataaactaaaatataaaataacaactacca

SEQ ID NO: 50022 - DNA, 50 bp, synthetic construct
  source 1..50: mol_type = other DNA
acgaccccttaaatataataataaactaaaatataaaataacgactaccg

SEQ ID NO: 50023 - DNA, 50 bp, synthetic construct
  source 1..50: mol_type = other DNA
tctctctttaattaaaactacacaaaaaaaaacaacaaaataaacacaca

SEQ ID NO: 50024 - DNA, 50 bp, synthetic construct
  source 1..50: mol_type = other DNA
tctctctttaattaaaactacgcgaaaaaaaacgacgaaataaacgcgcg

SEQ ID NO: 50025 - DNA, 50 bp, synthetic construct
  source 1..50: mol_type = other DNA
cacaatttctcttatctaccaaaaactcatatttactcactacacataca

SEQ ID NO: 50026 - DNA, 50 bp, synthetic construct
  source 1..50: mol_type = other DNA
cgcgatttctcttatctaccaaaaactcatatttactcactacgcatacg

SEQ ID NO: 50027 - DNA, 50 bp, synthetic construct
  source 1..50: mol_type = other DNA
cacatacacaataaataaacataaacctctaataaataaaaaaaaccaca

SEQ ID NO: 50028 - DNA, 50 bp, synthetic construct
  source 1..50: mol_type = other DNA
cgcatacgcaataaataaacataaacctctaataaataaaaaaaaccgcg

SEQ ID NO: 50029 - DNA, 50 bp, synthetic construct
  source 1..50: mol_type = other DNA
aataaaaaaaaccacaatcaaaatacaacacatacacaaatcaaaaatca

SEQ ID NO: 50030 - DNA, 50 bp, synthetic construct
  source 1..50: mol_type = other DNA
aataaaaaaaaccgcgatcgaaatacgacgcgtacgcaaatcaaaaatcg

SEQ ID NO: 50031 - DNA, 50 bp, synthetic construct
  source 1..50: mol_type = other DNA
cataccctcaacattctaaaaatatccaaatcacctcaacaaaaaattca

SEQ ID NO: 50032 - DNA, 50 bp, synthetic construct
  source 1..50: mol_type = other DNA
cgtaccctcaacgttctaaaaatatccaaatcacctcaacgaaaaattcg

SEQ ID NO: 50033 - DNA, 50 bp, synthetic construct
  source 1..50: mol_type = other DNA
caaatcctccactaaaataatttaaatatccctaaaacattaaaaacaca

SEQ ID NO: 50034 - DNA, 50 bp, synthetic construct
  source 1..50: mol_type = other DNA
cgaatcctccgctaaaataatttaaatatccctaaaacgttaaaaacacg

SEQ ID NO: 50035 - DNA, 50 bp, synthetic construct
  source 1..50: mol_type = other DNA
aaaactaccatcctaaaaataacaattccacaaaaacccaaaacaaaaca

SEQ ID NO: 50036 - DNA, 50 bp, synthetic construct
  source 1..50: mol_type = other DNA
aaaactaccgtcctaaaaataacgattccacgaaaacccaaaacgaaacg

SEQ ID NO: 50037 - DNA, 50 bp, synthetic construct
  source 1..50: mol_type = other DNA
ataaaccaccacacccaaccccatatttattctatttataacatctaaca

SEQ ID NO: 50038 - DNA, 50 bp, synthetic construct
  source 1..50: mol_type = other DNA
ataaaccaccgcgcccgaccccatatttattctatttataacatctaacg

SEQ ID NO: 50039 - DNA, 50 bp, synthetic construct
  source 1..50: mol_type = other DNA
aaattataaaattcccattaaataccataaataaaacaaatataaaacca

SEQ ID NO: 50040 - DNA, 50 bp, synthetic construct
  source 1..50: mol_type = other DNA
aaattataaaattcccgttaaataccataaataaaacaaatataaaaccg

SEQ ID NO: 50041 - DNA, 50 bp, synthetic construct
  source 1..50: mol_type = other DNA
taaaattcccattaaataccataaataaaacaaatataaaaccaaacaca

SEQ ID NO: 50042 - DNA, 50 bp, synthetic construct
  source 1..50: mol_type = other DNA
taaaattcccgttaaataccataaataaaacaaatataaaaccgaacgcg

SEQ ID NO: 50043 - DNA, 50 bp, synthetic construct
  source 1..50: mol_type = other DNA
ttcaccatatttctcaaactaatattaaactcctaacctcaaacaatcca

SEQ ID NO: 50044 - DNA, 50 bp, synthetic construct
  source 1..50: mol_type = other DNA
ttcaccgtatttctcaaactaatattaaactcctaacctcaaacgatccg

SEQ ID NO: 50045 - DNA, 50 bp, synthetic construct
  source 1..50: mol_type = other DNA
tcaaataaaaataaaactaaacatatctaaactcaaactctccttaaaca

SEQ ID NO: 50046 - DNA, 50 bp, synthetic construct
  source 1..50: mol_type = other DNA
tcaaataaaaataaaactaaacgtatctaaactcaaactctccttaaacg

SEQ ID NO: 50047 - DNA, 50 bp, synthetic construct
  source 1..50: mol_type = other DNA
ataaacttacaaacttataaacttaccaaaaacccaacctcactaatcca

SEQ ID NO: 50048 - DNA, 50 bp, synthetic construct
  source 1..50: mol_type = other DNA
ataaacttacgaacttataaacttaccgaaaacccaacctcgctaatccg

SEQ ID NO: 50049 - DNA, 50 bp, synthetic construct
  source 1..50: mol_type = other DNA
caaaaaaaaataacctaaacttataaacttacaaacttataaacttacca

SEQ ID NO: 50050 - DNA, 50 bp, synthetic construct
  source 1..50: mol_type = other DNA
caaaaaaaaataacctaaacttataaacttacgaacttataaacttaccg

SEQ ID NO: 50051 - DNA, 50 bp, synthetic construct
  source 1..50: mol_type = other DNA
taaaacctaaaaacaataccataaaaaaacaaaacaaccaaaacaaaaca

SEQ ID NO: 50052 - DNA, 50 bp, synthetic construct
  source 1..50: mol_type = other DNA
taaaacctaaaaacaataccgtaaaaaaacaaaacaaccgaaacaaaacg

SEQ ID NO: 50053 - DNA, 50 bp, synthetic construct
  source 1..50: mol_type = other DNA
aaaaaacccataaaacctaaaaacaataccataaaaaaacaaaacaacca

SEQ ID NO: 50054 - DNA, 50 bp, synthetic construct
  source 1..50: mol_type = other DNA
gaaaaacccgtaaaacctaaaaacaataccgtaaaaaaacaaaacaaccg

SEQ ID NO: 50055 - DNA, 50 bp, synthetic construct
  source 1..50: mol_type = other DNA
aaaacaaccaaaaattaacaataccacattctaaccatacaacaacaaca

SEQ ID NO: 50056 - DNA, 50 bp, synthetic construct
  source 1..50: mol_type = other DNA
aaaacaaccgaaaattaacaataccacgttctaaccatacgacgacgacg

SEQ ID NO: 50057 - DNA, 50 bp, synthetic construct
  source 1..50: mol_type = other DNA
aaacacaacctcctaaatctaacaaaaaaatccataactaaaaacacaca

SEQ ID NO: 50058 - DNA, 50 bp, synthetic construct
  source 1..50: mol_type = other DNA
aaacgcaacctcctaaatctaacaaaaaaatccgtaactaaaaacacgcg

SEQ ID NO: 50059 - DNA, 50 bp, synthetic construct
  source 1..50: mol_type = other DNA
ataaccataaaaaatttacctaatcctcctcaacaactacccacctacca

SEQ ID NO: 50060 - DNA, 50 bp, synthetic construct
  source 1..50: mol_type = other DNA
ataaccataaaaaatttacctaatcctcctcgacaactacccgcctaccg

SEQ ID NO: 50061 - DNA, 50 bp, synthetic construct
  source 1..50: mol_type = other DNA
tttaaccaacctaacaccaactatctatccccaaaaccaaatctacaaca

SEQ ID NO: 50062 - DNA, 50 bp, synthetic construct
  source 1..50: mol_type = other DNA
tttaaccaacctaacaccaactatctatccccgaaaccaaatctacgacg

SEQ ID NO: 50063 - DNA, 50 bp, synthetic construct
  source 1..50: mol_type = other DNA
ccacacctcccacataaaaataataaaacacatacaaataataaaacaca

SEQ ID NO: 50064 - DNA, 50 bp, synthetic construct
  source 1..50: mol_type = other DNA
ccacgcctcccacgtaaaaataataaaacacatacgaataataaaacacg

SEQ ID NO: 50065 - DNA, 50 bp, synthetic construct
  source 1..50: mol_type = other DNA
acctcccacataaaaataataaaacacatacaaataataaaacacataca

SEQ ID NO: 50066 - DNA, 50 bp, synthetic construct
  source 1..50: mol_type = other DNA
gcctcccacgtaaaaataataaaacacatacgaataataaaacacgtacg

SEQ ID NO: 50067 - DNA, 50 bp, synthetic construct
  source 1..50: mol_type = other DNA
tcctattcacaaattaccaaaccacaacctaaccaataataacaataaca

SEQ ID NO: 50068 - DNA, 50 bp, synthetic construct
  source 1..50: mol_type = other DNA
tcctattcacgaattaccaaaccgcgacctaaccgataataacaataacg

SEQ ID NO: 50069 - DNA, 50 bp, synthetic construct
  source 1..50: mol_type = other DNA
aaaactacctaacaacttctaaaaaaatttcctaaaaacacccaactaca

SEQ ID NO: 50070 - DNA, 50 bp, synthetic construct
  source 1..50: mol_type = other DNA
gaaactacctaacaacttctaaaaaaatttcctaaaaacgcccgactacg

SEQ ID NO: 50071 - DNA, 50 bp, synthetic construct
  source 1..50: mol_type = other DNA
ctacctaacaacttctaaaaaaatttcctaaaaacacccaactacaacca

SEQ ID NO: 50072 - DNA, 50 bp, synthetic construct
  source 1..50: mol_type = other DNA
ctacctaacaacttctaaaaaaatttcctaaaaacgcccgactacgaccg

SEQ ID NO: 50073 - DNA, 50 bp, synthetic construct
  source 1..50: mol_type = other DNA
ataaacaaaattaacacaactctaaaactactaaaacccacacacaaaca

SEQ ID NO: 50074 - DNA, 50 bp, synthetic construct
  source 1..50: mol_type = other DNA
ataaacgaaattaacgcaactctaaaactactaaaacccgcgcgcgaacg

SEQ ID NO: 50075 - DNA, 50 bp, synthetic construct
  source 1..50: mol_type = other DNA
aacacaaaataaacaaaattaacacaactctaaaactactaaaacccaca

SEQ ID NO: 50076 - DNA, 50 bp, synthetic construct
  source 1..50: mol_type = other DNA
aacgcgaaataaacgaaattaacgcaactctaaaactactaaaacccgcg

SEQ ID NO: 50077 - DNA, 50 bp, synthetic construct
  source 1..50: mol_type = other DNA
taaacacaaaataaacaaaattaacacaactctaaaactactaaaaccca

SEQ ID NO: 50078 - DNA, 50 bp, synthetic construct
  source 1..50: mol_type = other DNA
taaacgcgaaataaacgaaattaacgcaactctaaaactactaaaacccg

SEQ ID NO: 50079 - DNA, 50 bp, synthetic construct
  source 1..50: mol_type = other DNA
aatcacacaaaaacccccataaaataaacacaaaataaacaaaattaaca

SEQ ID NO: 50080 - DNA, 50 bp, synthetic construct
  source 1..50: mol_type = other DNA
gatcacgcgaaaacccccgtaaaataaacgcgaaataaacgaaattaacg

SEQ ID NO: 50081 - DNA, 50 bp, synthetic construct
  source 1..50: mol_type = other DNA
aaacaaaaactaccccatacaatcacacaaaaacccccataaaataaaca

SEQ ID NO: 50082 - DNA, 50 bp, synthetic construct
  source 1..50: mol_type = other DNA
aaacaaaaactaccccatacgatcacgcgaaaacccccgtaaaataaacg

SEQ ID NO: 50083 - DNA, 50 bp, synthetic construct
  source 1..50: mol_type = other DNA
aaaaacctcaaccaaaaacataaaaacaaaaactaccccatacaatcaca

SEQ ID NO: 50084 - DNA, 50 bp, synthetic construct
  source 1..50: mol_type = other DNA
gaaaacctcgaccgaaaacgtaaaaacaaaaactaccccatacgatcacg

SEQ ID NO: 50085 - DNA, 50 bp, synthetic construct
  source 1..50: mol_type = other DNA
aaactaaaaccaaaataaaatcaccaacaaacaacatactcaaaaaccca

SEQ ID NO: 50086 - DNA, 50 bp, synthetic construct
  source 1..50: mol_type = other DNA
aaactaaaaccaaaataaaatcgccgacgaacaacgtactcgaaaacccg

SEQ ID NO: 50087 - DNA, 50 bp, synthetic construct
  source 1..50: mol_type = other DNA
aaaaaccctaaaatcacaaaaccaccaaaactaaaaccaaaataaaatca

SEQ ID NO: 50088 - DNA, 50 bp, synthetic construct
  source 1..50: mol_type = other DNA
gaaaaccctaaaatcgcgaaaccgccgaaactaaaaccaaaataaaatcg

SEQ ID NO: 50089 - DNA, 50 bp, synthetic construct
  source 1..50: mol_type = other DNA
caaaactacaaaactacaaaactaccaaactaccaaaaaccctaaaatca

SEQ ID NO: 50090 - DNA, 50 bp, synthetic construct
  source 1..50: mol_type = other DNA
cgaaactacgaaactacgaaactaccgaactaccgaaaaccctaaaatcg

SEQ ID NO: 50091 - DNA, 50 bp, synthetic construct
  source 1..50: mol_type = other DNA
ataaattaaatacaaatcacaaattatactttctttacacactatcttca

SEQ ID NO: 50092 - DNA, 50 bp, synthetic construct
  source 1..50: mol_type = other DNA
ataaattaaatacgaatcacgaattatactttctttacgcgctatcttcg

SEQ ID NO: 50093 - DNA, 50 bp, synthetic construct
  source 1..50: mol_type = other DNA
aaattctaaataaattaaatacaaatcacaaattatactttctttacaca

SEQ ID NO: 50094 - DNA, 50 bp, synthetic construct
  source 1..50: mol_type = other DNA
aaattctaaataaattaaatacgaatcacgaattatactttctttacgcg

SEQ ID NO: 50095 - DNA, 50 bp, synthetic construct
  source 1..50: mol_type = other DNA
ttttataaaaacactataaaaatattcataaaatctacaaaaacaacaca

SEQ ID NO: 50096 - DNA, 50 bp, synthetic construct
  source 1..50: mol_type = other DNA
ttttataaaaacactataaaaatattcataaaatctacgaaaacaacgcg

SEQ ID NO: 50097 - DNA, 50 bp, synthetic construct
  source 1..50: mol_type = other DNA
tcataaaatctacaaaaacaacacacaaaaaaaacacaacccataactca

SEQ ID NO: 50098 - DNA, 50 bp, synthetic construct
  source 1..50: mol_type = other DNA
tcataaaatctacgaaaacaacgcgcaaaaaaaacacaacccgtaactcg

SEQ ID NO: 50099 - DNA, 50 bp, synthetic construct
  source 1..50: mol_type = other DNA
taataaaaactaaataaattacacaaacaaacacaatcaaacctactaca

SEQ ID NO: 50100 - DNA, 50 bp, synthetic construct
  source 1..50: mol_type = other DNA
taataaaaactaaataaattacacaaacaaacacaatcaaacctactacg

SEQ ID NO: 50101 - DNA, 50 bp, synthetic construct
  source 1..50: mol_type = other DNA
actaacaaatataacataaaacaaaaaaccaaaccaaaaacaaactacca

SEQ ID NO: 50102 - DNA, 50 bp, synthetic construct
  source 1..50: mol_type = other DNA
actaacgaatataacataaaacgaaaaaccaaaccgaaaacgaactaccg

SEQ ID NO: 50103 - DNA, 50 bp, synthetic construct
  source 1..50: mol_type = other DNA
acataacatacccaaaatacttccaacccacaatcttatacaactaatca

SEQ ID NO: 50104 - DNA, 50 bp, synthetic construct
  source 1..50: mol_type = other DNA
acgtaacatacccaaaatacttccgacccacgatcttatacaactaatcg

SEQ ID NO: 50105 - DNA, 50 bp, synthetic construct
  source 1..50: mol_type = other DNA
aaaaaaaacaaacacataaccccaatcaaccaatctaaatactactaaca

SEQ ID NO: 50106 - DNA, 50 bp, synthetic construct
  source 1..50: mol_type = other DNA
aaaaaaaacgaacacgtaaccccgatcaaccaatctaaatactactaacg

SEQ ID NO: 50107 - DNA, 50 bp, synthetic construct
  source 1..50: mol_type = other DNA
ataaatcaaaaactaacctcaaccaactacaaacacacttaactacccca

SEQ ID NO: 50108 - DNA, 50 bp, synthetic construct
  source 1..50: mol_type = other DNA
ataaatcaaaaactaacctcgaccaactacaaacacgcttaactaccccg

SEQ ID NO: 50109 - DNA, 50 bp, synthetic construct
  source 1..50: mol_type = other DNA
cctactatacaaaaactctactcaaacacaataattaacactcaaaccca

SEQ ID NO: 50110 - DNA, 50 bp, synthetic construct
  source 1..50: mol_type = other DNA
cctactatacaaaaactctactcaaacgcaataattaacactcgaacccg

SEQ ID NO: 50111 - DNA, 50 bp, synthetic construct
  source 1..50: mol_type = other DNA
cacaaaaaaacaatccaaaatttaaaaaaacaaaaccaatacaacaaaca

SEQ ID NO: 50112 - DNA, 50 bp, synthetic construct
  source 1..50: mol_type = other DNA
cgcgaaaaaacgatccgaaatttaaaaaaacgaaaccgatacgacgaacg

SEQ ID NO: 50113 - DNA, 50 bp, synthetic construct
  source 1..50: mol_type = other DNA
aaaaaacaatccaaaatttaaaaaaacaaaaccaatacaacaaacaaaca

SEQ ID NO: 50114 - DNA, 50 bp, synthetic construct
  source 1..50: mol_type = other DNA
aaaaaacgatccgaaatttaaaaaaacgaaaccgatacgacgaacgaacg

SEQ ID NO: 50115 - DNA, 50 bp, synthetic construct
  source 1..50: mol_type = other DNA
caaaaaacctcaatataaataaccccacaaaattaaattctaaactcaca

SEQ ID NO: 50116 - DNA, 50 bp, synthetic construct
  source 1..50: mol_type = other DNA
cgaaaaacctcgatataaataaccccgcgaaattaaattctaaactcgcg

SEQ ID NO: 50117 - DNA, 50 bp, synthetic construct
  source 1..50: mol_type = other DNA
aaaaagaattagttaggtgtagtggtatgtatttgttgttttagttattt

SEQ ID NO: 50118 - DNA, 50 bp, synthetic construct
  source 1..50: mol_type = other DNA
aaaaagaattagttaggtgtagtggtatgtatttgttgttttagttattc

SEQ ID NO: 50119 - DNA, 50 bp, synthetic construct
  source 1..50: mol_type = other DNA
atactattatccctcaaaaacatatacacacaaaaacatttccttatcca

SEQ ID NO: 50120 - DNA, 50 bp, synthetic construct
  source 1..50: mol_type = other DNA
atactattatccctcaaaaacgtatacgcgcaaaaacgtttccttatccg

SEQ ID NO: 50121 - DNA, 50 bp, synthetic construct
  source 1..50: mol_type = other DNA
aaacatctacaactatttatcaattaatttaccactattctttaaaaaca

SEQ ID NO: 50122 - DNA, 50 bp, synthetic construct
  source 1..50: mol_type = other DNA
aaacatctacaactatttatcaattaatttaccgctattctttaaaaacg

SEQ ID NO: 50123 - DNA, 50 bp, synthetic construct
  source 1..50: mol_type = other DNA
atataaactaaatatactaataaactcaaaaaaaacctaaatcaaaacca

SEQ ID NO: 50124 - DNA, 50 bp, synthetic construct
  source 1..50: mol_type = other DNA
atataaactaaatatactaataaactcaaaaaaaacctaaatcgaaaccg

SEQ ID NO: 50125 - DNA, 50 bp, synthetic construct
  source 1..50: mol_type = other DNA
gtttgtattgatataaatggttgtataaatagaagagagagatttgtgtt

SEQ ID NO: 50126 - DNA, 50 bp, synthetic construct
  source 1..50: mol_type = other DNA
gtttgtattgatataaatggttgtataaatagaagagagagatttgtgtc

SEQ ID NO: 50127 - DNA, 50 bp, synthetic construct
  source 1..50: mol_type = other DNA
ctcaatactttaataaaccaaaacaaacaaattacaaaatcaaaaaatca

SEQ ID NO: 50128 - DNA, 50 bp, synthetic construct
  source 1..50: mol_type = other DNA
ctcaatactttaataaaccgaaacaaacgaattacgaaatcaaaaaatcg

SEQ ID NO: 50129 - DNA, 50 bp, synthetic construct
  source 1..50: mol_type = other DNA
ataggagtgagttattaagtttggttaattttggtatttttagtagagat

SEQ ID NO: 50130 - DNA, 50 bp, synthetic construct
  source 1..50: mol_type = other DNA
ataggagtgagttattaagttcggttaattttggtatttttagtagagac

SEQ ID NO: 50131 - DNA, 50 bp, synthetic construct
  source 1..50: mol_type = other DNA
caaatattaaatctttacattttactatttcaaactacaaatatctatca

SEQ ID NO: 50132 - DNA, 50 bp, synthetic construct
  source 1..50: mol_type = other DNA
cgaatattaaatctttacattttactatttcgaactacaaatatctatcg

SEQ ID NO: 50133 - DNA, 50 bp, synthetic construct
  source 1..50: mol_type = other DNA
tttaacaaaaacaaaatttcactatattaatcaatctaatcttaaactca

SEQ ID NO: 50134 - DNA, 50 bp, synthetic construct
  source 1..50: mol_type = other DNA
tttaacaaaaacaaaatttcgctatattaatcaatctaatcttaaactcg

SEQ ID NO: 50135 - DNA, 50 bp, synthetic construct
  source 1..50: mol_type = other DNA
ataaaaacaaacaattacctaccaaaaaaacacatacttataaccaacca

SEQ ID NO: 50136 - DNA, 50 bp, synthetic construct
  source 1..50: mol_type = other DNA
gtaaaaacgaacgattacctaccaaaaaaacgcatacttataaccgaccg

SEQ ID NO: 50137 - DNA, 50 bp, synthetic construct
  source 1..50: mol_type = other DNA
tcaacacatacaaaaaattaaaaaacttctaaacaacaacaatacaacca

SEQ ID NO: 50138 - DNA, 50 bp, synthetic construct
  source 1..50: mol_type = other DNA
tcaacacatacaaaaaattaaaaaacttctaaacaacgacgatacgaccg

SEQ ID NO: 50139 - DNA, 50 bp, synthetic construct
  source 1..50: mol_type = other DNA
aaacacaaacaaataataaataaaacaaaccaacatcataaaaacaaaca

SEQ ID NO: 50140 - DNA, 50 bp, synthetic construct
  source 1..50: mol_type = other DNA
aaacacaaacaaataataaataaaacgaaccgacgtcgtaaaaacgaacg

SEQ ID NO: 50141 - DNA, 50 bp, synthetic construct
  source 1..50: mol_type = other DNA
acaaaaacacaaacaaataataaataaaacaaaccaacatcataaaaaca

SEQ ID NO: 50142 - DNA, 50 bp, synthetic construct
  source 1..50: mol_type = other DNA
acaaaaacacaaacaaataataaataaaacgaaccgacgtcgtaaaaacg

SEQ ID NO: 50143 - DNA, 50 bp, synthetic construct
  source 1..50: mol_type = other DNA
tatactacccaaactaaaaactcctaaactcaaacaatcctcttacctca

SEQ ID NO: 50144 - DNA, 50 bp, synthetic construct
  source 1..50: mol_type = other DNA
tatactacccaaactaaaaactcctaaactcaaacgatcctcttacctcg

SEQ ID NO: 50145 - DNA, 50 bp, synthetic construct
  source 1..50: mol_type = other DNA
ctcatttaaatataacccaaaacactaaacaacaaattccccaccaacca

SEQ ID NO: 50146 - DNA, 50 bp, synthetic construct
  source 1..50: mol_type = other DNA
ctcgtttaaatataacccgaaacactaaacaacgaattccccaccaaccg

SEQ ID NO: 50147 - DNA, 50 bp, synthetic construct
  source 1..50: mol_type = other DNA
taaataaaactacaacaacaacaaaacacaaacaaccatatttaccaaca

SEQ ID NO: 50148 - DNA, 50 bp, synthetic construct
  source 1..50: mol_type = other DNA
taaataaaactacgacgacgacaaaacgcgaacgaccatatttaccgacg

SEQ ID NO: 50149 - DNA, 50 bp, synthetic construct
  source 1..50: mol_type = other DNA
atattatattcctaaaaccaacaaacttaactaatatattaaatataaca

SEQ ID NO: 50150 - DNA, 50 bp, synthetic construct
  source 1..50: mol_type = other DNA
atattatattcctaaaaccaacaaacttaactaatatattaaatataacg

SEQ ID NO: 50151 - DNA, 50 bp, synthetic construct
  source 1..50: mol_type = other DNA
acaaaaattacaataaactaaaatcacaccacttcaatccaacctaaaca

SEQ ID NO: 50152 - DNA, 50 bp, synthetic construct
  source 1..50: mol_type = other DNA
acgaaaattacaataaactaaaatcacgccacttcaatccaacctaaacg

SEQ ID NO: 50153 - DNA, 50 bp, synthetic construct
  source 1..50: mol_type = other DNA
aaaaaacaaaaacataactcccaaaaacctcacacttatactcaatacca

SEQ ID NO: 50154 - DNA, 50 bp, synthetic construct
  source 1..50: mol_type = other DNA
aaaaaacgaaaacgtaactcccgaaaacctcacacttatactcaataccg

SEQ ID NO: 50155 - DNA, 50 bp, synthetic construct
  source 1..50: mol_type = other DNA
aaaatacatcaataaaaaaaaactcacctctccaaattaaaacaataaca

SEQ ID NO: 50156 - DNA, 50 bp, synthetic construct
  source 1..50: mol_type = other DNA
aaaatacgtcgataaaaaaaaactcacctctccaaattaaaacgataacg

SEQ ID NO: 50157 - DNA, 50 bp, synthetic construct
  source 1..50: mol_type = other DNA
acccccaaaaccaaaaactaacaaaattcaaacacaaatctaaaaaatca

SEQ ID NO: 50158 - DNA, 50 bp, synthetic construct
  source 1..50: mol_type = other DNA
acccccaaaaccgaaaactaacaaaattcgaacgcgaatctaaaaaatcg

SEQ ID NO: 50159 - DNA, 50 bp, synthetic construct
  source 1..50: mol_type = other DNA
aaaacaatttccactaacccccaaaaccaaaaactaacaaaattcaaaca

SEQ ID NO: 50160 - DNA, 50 bp, synthetic construct
  source 1..50: mol_type = other DNA
aaaacgatttccgctaacccccaaaaccgaaaactaacaaaattcgaacg

SEQ ID NO: 50161 - DNA, 50 bp, synthetic construct
  source 1..50: mol_type = other DNA
aataaaaacaatttccactaacccccaaaaccaaaaactaacaaaattca

SEQ ID NO: 50162 - DNA, 50 bp, synthetic construct
  source 1..50: mol_type = other DNA
aataaaaacgatttccgctaacccccaaaaccgaaaactaacaaaattcg

SEQ ID NO: 50163 - DNA, 50 bp, synthetic construct
  source 1..50: mol_type = other DNA
aaaaataccaaataaaatcaaaacaaacaacaaaactttatccccattca

SEQ ID NO: 50164 - DNA, 50 bp, synthetic construct
  source 1..50: mol_type = other DNA
aaaaataccaaataaaatcgaaacgaacgacgaaactttatccccattcg

SEQ ID NO: 50165 - DNA, 50 bp, synthetic construct
  source 1..50: mol_type = other DNA
aataaacaaataccctaatattctcataaaccaaccccaaaccctttaca

SEQ ID NO: 50166 - DNA, 50 bp, synthetic construct
  source 1..50: mol_type = other DNA
aataaacaaataccctaatattctcgtaaaccgaccccaaaccctttacg

SEQ ID NO: 50167 - DNA, 50 bp, synthetic construct
  source 1..50: mol_type = other DNA
aaaataaaacataataaaaaaaacaaccccttccttcaacacaacacaca

SEQ ID NO: 50168 - DNA, 50 bp, synthetic construct
  source 1..50: mol_type = other DNA
aaaataaaacataataaaaaaaacgaccccttccttcaacgcgacacacg

SEQ ID NO: 50169 - DNA, 50 bp, synthetic construct
  source 1..50: mol_type = other DNA
aaacctaaaaaaataaaacataataaaaaaaacaaccccttccttcaaca

SEQ ID NO: 50170 - DNA, 50 bp, synthetic construct
  source 1..50: mol_type = other DNA
aaacctaaaaaaataaaacataataaaaaaaacgaccccttccttcaacg

SEQ ID NO: 50171 - DNA, 50 bp, synthetic construct
  source 1..50: mol_type = other DNA
ctctaaccaataaattaaaaacaaaaaacacatatatcacttccaaccca

SEQ ID NO: 50172 - DNA, 50 bp, synthetic construct
  source 1..50: mol_type = other DNA
ctctaaccaataaattaaaaacaaaaaacgcgtatatcacttccaacccg

SEQ ID NO: 50173 - DNA, 50 bp, synthetic construct
  source 1..50: mol_type = other DNA
caaaaaaaaataccactccctctcacctcaaactaaaaataacacacaca

SEQ ID NO: 50174 - DNA, 50 bp, synthetic construct
  source 1..50: mol_type = other DNA
caaaaaaaaataccactccctctcacctcgaactaaaaataacacacgcg

SEQ ID NO: 50175 - DNA, 50 bp, synthetic construct
  source 1..50: mol_type = other DNA
ttatctttcttctttttttatcattttaatcataattattacaatcatca

SEQ ID NO: 50176 - DNA, 50 bp, synthetic construct
  source 1..50: mol_type = other DNA
ttatctttcttctttttttatcattttaatcataattattacgatcgtcg

SEQ ID NO: 50177 - DNA, 50 bp, synthetic construct
  source 1..50: mol_type = other DNA
tcacaacccctaccttaaataccacaataaaatccctaaacaaataacca

SEQ ID NO: 50178 - DNA, 50 bp, synthetic construct
  source 1..50: mol_type = other DNA
tcacgacccctaccttaaataccacaataaaatccctaaacgaataaccg

SEQ ID NO: 50179 - DNA, 50 bp, synthetic construct
  source 1..50: mol_type = other DNA
aaatactcacacaacctctaactcaaacaacctctcaactaaaaacaaca

SEQ ID NO: 50180 - DNA, 50 bp, synthetic construct
  source 1..50: mol_type = other DNA
aaatactcacacaacctctaactcaaacaacctctcgactaaaaacgacg

SEQ ID NO: 50181 - DNA, 50 bp, synthetic construct
  source 1..50: mol_type = other DNA
aattgttgattataggtatggggttgtgtagtgaatttttggagtttatt

SEQ ID NO: 50182 - DNA, 50 bp, synthetic construct
  source 1..50: mol_type = other DNA
aattgttgattataggtatggggttgtgtagcgaatttttggagtttatc

SEQ ID NO: 50183 - DNA, 50 bp, synthetic construct
  source 1..50: mol_type = other DNA
ctaaaaaaaataccatatacaatatctaaaaactactaatttttaaatca

SEQ ID NO: 50184 - DNA, 50 bp, synthetic construct
  source 1..50: mol_type = other DNA
ctaaaaaaaataccgtatacaatatctaaaaactactaatttttaaatcg

SEQ ID NO: 50185 - DNA, 50 bp, synthetic construct
  source 1..50: mol_type = other DNA
aacccttaccatcaccaacattcaatacttacaaatatatcactcaatca

SEQ ID NO: 50186 - DNA, 50 bp, synthetic construct
  source 1..50: mol_type = other DNA
aacccttaccgtcaccaacgttcaatacttacaaatatatcactcaatcg

SEQ ID NO: 50187 - DNA, 50 bp, synthetic construct
  source 1..50: mol_type = other DNA
gtttagttttgagaattttttggtttaggggatagaagtttttaattatt

SEQ ID NO: 50188 - DNA, 50 bp, synthetic construct
  source 1..50: mol_type = other DNA
gtttagttttgagaattttttggtttaggggatagaagtttttaattatc

SEQ ID NO: 50189 - DNA, 50 bp, synthetic construct
  source 1..50: mol_type = other DNA
aacactactaactcaaactaccaaccaccctaataatttacattttatca

SEQ ID NO: 50190 - DNA, 50 bp, synthetic construct
  source 1..50: mol_type = other DNA
aacgctactaactcaaactaccgaccgccctaataatttacgttttatcg

SEQ ID NO: 50191 - DNA, 50 bp, synthetic construct
  source 1..50: mol_type = other DNA
aacaacaaaacataaactatcaaaacaatcaacaatctaaaccaacaaca

SEQ ID NO: 50192 - DNA, 50 bp, synthetic construct
  source 1..50: mol_type = other DNA
aacgacaaaacgtaaactatcaaaacgatcgacaatctaaaccaacaacg

SEQ ID NO: 50193 - DNA, 50 bp, synthetic construct
  source 1..50: mol_type = other DNA
tacaccccttctccccaaaaaaactccaaaaccctaaaactaaataaaca

SEQ ID NO: 50194 - DNA, 50 bp, synthetic construct
  source 1..50: mol_type = other DNA
tacaccccttctccccgaaaaaactccaaaaccctaaaactaaataaacg

SEQ ID NO: 50195 - DNA, 50 bp, synthetic construct
  source 1..50: mol_type = other DNA
ctccctcacacccataaaaactctccaaacaaataaaactaaacaaaaca

SEQ ID NO: 50196 - DNA, 50 bp, synthetic construct
  source 1..50: mol_type = other DNA
ctccctcgcacccataaaaactctccaaacgaataaaactaaacaaaacg

SEQ ID NO: 50197 - DNA, 50 bp, synthetic construct
  source 1..50: mol_type = other DNA
tatcaaaaccttcctataaaataaaaaaacaccctactcaactccaccca

SEQ ID NO: 50198 - DNA, 50 bp, synthetic construct
  source 1..50: mol_type = other DNA
tatcaaaaccttcctataaaataaaaaaacgccctactcaactccacccg

SEQ ID NO: 50199 - DNA, 50 bp, synthetic construct
  source 1..50: mol_type = other DNA
ctcaacattcaacaatttaaaaaacaaaaccacactccccatctccctca

SEQ ID NO: 50200 - DNA, 50 bp, synthetic construct
  source 1..50: mol_type = other DNA
ctcaacattcaacaatttaaaaaacaaaaccgcactccccatctccctcg

SEQ ID NO: 50201 - DNA, 50 bp, synthetic construct
  source 1..50: mol_type = other DNA
ctctatattaatcaaactaatctcaaactcctaacctcaactaatctaca

SEQ ID NO: 50202 - DNA, 50 bp, synthetic construct
  source 1..50: mol_type = other DNA
ctctatattaatcaaactaatctcgaactcctaacctcaactaatctacg

SEQ ID NO: 50203 - DNA, 50 bp, synthetic construct
  source 1..50: mol_type = other DNA
accctattcctaaaactccaaaaaaacaaaccccaaaacacctaaaaaca

SEQ ID NO: 50204 - DNA, 50 bp, synthetic construct
  source 1..50: mol_type = other DNA
accctattcctaaaactccaaaaaaacgaaccccaaaacgcctaaaaacg

SEQ ID NO: 50205 - DNA, 50 bp, synthetic construct
  source 1..50: mol_type = other DNA
ctattcctaaaactccaaaaaaacaaaccccaaaacacctaaaaacacca

SEQ ID NO: 50206 - DNA, 50 bp, synthetic construct
  source 1..50: mol_type = other DNA
ctattcctaaaactccaaaaaaacgaaccccaaaacgcctaaaaacgccg

SEQ ID NO: 50207 - DNA, 50 bp, synthetic construct
  source 1..50: mol_type = other DNA
tataaacaaaaacccaaaacatccactaaaaaacacaaattttacatcca

SEQ ID NO: 50208 - DNA, 50 bp, synthetic construct
  source 1..50: mol_type = other DNA
tataaacaaaaacccaaaacgtccgctaaaaaacgcaaattttacgtccg

SEQ ID NO: 50209 - DNA, 50 bp, synthetic construct
  source 1..50: mol_type = other DNA
aaatttaatttattttataaacaaaaacccaaaacatccactaaaaaaca

SEQ ID NO: 50210 - DNA, 50 bp, synthetic construct
  source 1..50: mol_type = other DNA
gaatttaatttattttataaacaaaaacccaaaacgtccgctaaaaaacg

SEQ ID NO: 50211 - DNA, 50 bp, synthetic construct
  source 1..50: mol_type = other DNA
aaaaacacaaacacaaatttaatttattttataaacaaaaacccaaaaca

SEQ ID NO: 50212 - DNA, 50 bp, synthetic construct
  source 1..50: mol_type = other DNA
aaaaacgcaaacacgaatttaatttattttataaacaaaaacccaaaacg

SEQ ID NO: 50213 - DNA, 50 bp, synthetic construct
  source 1..50: mol_type = other DNA
aattccttaattacataactacaatatctacccaatactaaaacataaca

SEQ ID NO: 50214 - DNA, 50 bp, synthetic construct
  source 1..50: mol_type = other DNA
aattccttaattacgtaactacgatatctacccgatactaaaacgtaacg

SEQ ID NO: 50215 - DNA, 50 bp, synthetic construct
  source 1..50: mol_type = other DNA
caaccacataaccaaaaaaccccaaataaaacattaaccaaataaaacca

SEQ ID NO: 50216 - DNA, 50 bp, synthetic construct
  source 1..50: mol_type = other DNA
caaccacgtaaccaaaaaaccccgaataaaacgttaaccaaataaaaccg

SEQ ID NO: 50217 - DNA, 50 bp, synthetic construct
  source 1..50: mol_type = other DNA
cataaccaaaaaaccccaaataaaacattaaccaaataaaaccaaatcca

SEQ ID NO: 50218 - DNA, 50 bp, synthetic construct
  source 1..50: mol_type = other DNA
cgtaaccaaaaaaccccgaataaaacgttaaccaaataaaaccgaatccg

SEQ ID NO: 50219 - DNA, 50 bp, synthetic construct
  source 1..50: mol_type = other DNA
caacctaaatctaataaaaaaaaccaaaaacaaaactcatacacaaaaca

SEQ ID NO: 50220 - DNA, 50 bp, synthetic construct
  source 1..50: mol_type = other DNA
cgacctaaatctaataaaaaaaaccgaaaacgaaactcgtacgcgaaacg

SEQ ID NO: 50221 - DNA, 50 bp, synthetic construct
  source 1..50: mol_type = other DNA
cattaaccaaataaaaccaaatccaaaaataaaaaaaccacttcacccca

SEQ ID NO: 50222 - DNA, 50 bp, synthetic construct
  source 1..50: mol_type = other DNA
cgttaaccaaataaaaccgaatccgaaaataaaaaaaccacttcgccccg

SEQ ID NO: 50223 - DNA, 50 bp, synthetic construct
  source 1..50: mol_type = other DNA
ttaaccaaataaaaccaaatccaaaaataaaaaaaccacttcaccccaca

SEQ ID NO: 50224 - DNA, 50 bp, synthetic construct
  source 1..50: mol_type = other DNA
ttaaccaaataaaaccgaatccgaaaataaaaaaaccacttcgccccgcg

SEQ ID NO: 50225 - DNA, 50 bp, synthetic construct
  source 1..50: mol_type = other DNA
atcatctaaatcaacctaaatctaataaaaaaaaccaaaaacaaaactca

SEQ ID NO: 50226 - DNA, 50 bp, synthetic construct
  source 1..50: mol_type = other DNA
gtcatctaaatcgacctaaatctaataaaaaaaaccgaaaacgaaactcg

SEQ ID NO: 50227 - DNA, 50 bp, synthetic construct
  source 1..50: mol_type = other DNA
cctactcaaacacatcatctaaatcaacctaaatctaataaaaaaaacca

SEQ ID NO: 50228 - DNA, 50 bp, synthetic construct
  source 1..50: mol_type = other DNA
cctactcgaacacgtcatctaaatcgacctaaatctaataaaaaaaaccg

SEQ ID NO: 50229 - DNA, 50 bp, synthetic construct
  source 1..50: mol_type = other DNA
cccaccaaacccaaaccaacctaaataacatatccaaataaaaattaaca

SEQ ID NO: 50230 - DNA, 50 bp, synthetic construct
  source 1..50: mol_type = other DNA
cccaccaaacccaaaccgacctaaataacgtatccgaataaaaattaacg

SEQ ID NO: 50231 - DNA, 50 bp, synthetic construct
  source 1..50: mol_type = other DNA
aacccaaaccaacctaaataacatatccaaataaaaattaacaaaataca

SEQ ID NO: 50232 - DNA, 50 bp, synthetic construct
  source 1..50: mol_type = other DNA
aacccaaaccgacctaaataacgtatccgaataaaaattaacgaaatacg

SEQ ID NO: 50233 - DNA, 50 bp, synthetic construct
  source 1..50: mol_type = other DNA
ccaacctaaataacatatccaaataaaaattaacaaaatacaaccaaaca

SEQ ID NO: 50234 - DNA, 50 bp, synthetic construct
  source 1..50: mol_type = other DNA
ccgacctaaataacgtatccgaataaaaattaacgaaatacgaccgaacg

SEQ ID NO: 50235 - DNA, 50 bp, synthetic construct
  source 1..50: mol_type = other DNA
cctaaataacatatccaaataaaaattaacaaaatacaaccaaacaacca

SEQ ID NO: 50236 - DNA, 50 bp, synthetic construct
  source 1..50: mol_type = other DNA
cctaaataacgtatccgaataaaaattaacgaaatacgaccgaacgaccg

SEQ ID NO: 50237 - DNA, 50 bp, synthetic construct
  source 1..50: mol_type = other DNA
taccacaaacaatataacaaaaaaactatataataaatataaaaacttca

SEQ ID NO: 50238 - DNA, 50 bp, synthetic construct
  source 1..50: mol_type = other DNA
taccgcgaacaatataacaaaaaaactatataataaatataaaaacttcg

SEQ ID NO: 50239 - DNA, 50 bp, synthetic construct
  source 1..50: mol_type = other DNA
tatataataaatataaaaacttcataaaacccaacaacaaacaaaaaaca

SEQ ID NO: 50240 - DNA, 50 bp, synthetic construct
  source 1..50: mol_type = other DNA
tatataataaatataaaaacttcgtaaaacccaacaacaaacgaaaaacg

SEQ ID NO: 50241 - DNA, 50 bp, synthetic construct
  source 1..50: mol_type = other DNA
acactcacattccaattccaaattacaaattccaatctaaaactcccaca

SEQ ID NO: 50242 - DNA, 50 bp, synthetic construct
  source 1..50: mol_type = other DNA
acgctcacgttccaattccaaattacaaattccgatctaaaactcccacg

SEQ ID NO: 50243 - DNA, 50 bp, synthetic construct
  source 1..50: mol_type = other DNA
taaaaaaactattccaacactcacattccaattccaaattacaaattcca

SEQ ID NO: 50244 - DNA, 50 bp, synthetic construct
  source 1..50: mol_type = other DNA
taaaaaaactattccgacgctcacgttccaattccaaattacaaattccg

SEQ ID NO: 50245 - DNA, 50 bp, synthetic construct
  source 1..50: mol_type = other DNA
aaaaactcctcctaatacctacaaccattctcactaaacatatacaaaca

SEQ ID NO: 50246 - DNA, 50 bp, synthetic construct
  source 1..50: mol_type = other DNA
gaaaactcctcctaatacctacgaccgttctcactaaacatatacaaacg

SEQ ID NO: 50247 - DNA, 50 bp, synthetic construct
  source 1..50: mol_type = other DNA
attacaatccacttcaatttctattacaaaacccaaaatatctcctaaca

SEQ ID NO: 50248 - DNA, 50 bp, synthetic construct
  source 1..50: mol_type = other DNA
attacgatccgcttcgatttctattacgaaacccgaaatatctcctaacg

SEQ ID NO: 50249 - DNA, 50 bp, synthetic construct
  source 1..50: mol_type = other DNA
cttctaaaaaccaacttcctttatctctaacaaccttataatcatctcca

SEQ ID NO: 50250 - DNA, 50 bp, synthetic construct
  source 1..50: mol_type = other DNA
cttctaaaaaccgacttcctttatctctaacgaccttataatcgtctccg

SEQ ID NO: 50251 - DNA, 50 bp, synthetic construct
  source 1..50: mol_type = other DNA
aaccccctaaatttaattaccctttccccaaaacaactatcataaacaca

SEQ ID NO: 50252 - DNA, 50 bp, synthetic construct
  source 1..50: mol_type = other DNA
aaccccctaaatttaattaccctttccccgaaacaactatcataaacgcg

SEQ ID NO: 50253 - DNA, 50 bp, synthetic construct
  source 1..50: mol_type = other DNA
aatttaattaccctttccccaaaacaactatcataaacacaaaactacca

SEQ ID NO: 50254 - DNA, 50 bp, synthetic construct
  source 1..50: mol_type = other DNA
aatttaattaccctttccccgaaacaactatcataaacgcgaaactaccg

SEQ ID NO: 50255 - DNA, 50 bp, synthetic construct
  source 1..50: mol_type = other DNA
caactatcataaacacaaaactaccaatattatctccacctcaataacca

SEQ ID NO: 50256 - DNA, 50 bp, synthetic construct
  source 1..50: mol_type = other DNA
caactatcataaacgcgaaactaccgatattatctccacctcgataaccg

SEQ ID NO: 50257 - DNA, 50 bp, synthetic construct
  source 1..50: mol_type = other DNA
ttccaacaatacatcaaaaaactcatcaaacctcacccaccttacactca

SEQ ID NO: 50258 - DNA, 50 bp, synthetic construct
  source 1..50: mol_type = other DNA
ttccaacaatacatcaaaaaactcgtcaaacctcacccaccttacactcg

SEQ ID NO: 50259 - DNA, 50 bp, synthetic construct
  source 1..50: mol_type = other DNA
tcccccaaataaaaacaacttccccttccaacaatacatcaaaaaactca

SEQ ID NO: 50260 - DNA, 50 bp, synthetic construct
  source 1..50: mol_type = other DNA
tcccccgaataaaaacgacttccccttccaacaatacatcaaaaaactcg

SEQ ID NO: 50261 - DNA, 50 bp, synthetic construct
  source 1..50: mol_type = other DNA
aaactaacatcacaacaaaaaaactatcaacacccaaaccaatcaccaca

SEQ ID NO: 50262 - DNA, 50 bp, synthetic construct
  source 1..50: mol_type = other DNA
aaactaacatcacaacaaaaaaactatcaacgcccgaaccaatcaccgcg

SEQ ID NO: 50263 - DNA, 50 bp, synthetic construct
  source 1..50: mol_type = other DNA
tatatatatataccaaacctaaaaaaaaacaacctcacacaaaaaactca

SEQ ID NO: 50264 - DNA, 50 bp, synthetic construct
  source 1..50: mol_type = other DNA
tatatatatataccaaacctaaaaaaaaacgacctcgcacaaaaaactcg

SEQ ID NO: 50265 - DNA, 50 bp, synthetic construct
  source 1..50: mol_type = other DNA
aataaccaactacatacccaaacaataaccaaactctctatacaaaacca

SEQ ID NO: 50266 - DNA, 50 bp, synthetic construct
  source 1..50: mol_type = other DNA
aataaccaactacatacccgaacaataaccgaactctctatacgaaaccg

SEQ ID NO: 50267 - DNA, 50 bp, synthetic construct
  source 1..50: mol_type = other DNA
taaacctctctaaaccaaactacctccttccaaatatatctctctaaaca

SEQ ID NO: 50268 - DNA, 50 bp, synthetic construct
  source 1..50: mol_type = other DNA
taaacctctctaaaccgaactacctccttccgaatatatctctctaaacg

SEQ ID NO: 50269 - DNA, 50 bp, synthetic construct
  source 1..50: mol_type = other DNA
ccaaattccctccaaaaaaacaaaatttccctttcttctctaacttctca

SEQ ID NO: 50270 - DNA, 50 bp, synthetic construct
  source 1..50: mol_type = other DNA
ccgaattccctccgaaaaaacaaaatttccctttcttctctaacttctcg

SEQ ID NO: 50271 - DNA, 50 bp, synthetic construct
  source 1..50: mol_type = other DNA
ccaaaaaaacaaaatttccctttcttctctaacttctcaatccccattca

SEQ ID NO: 50272 - DNA, 50 bp, synthetic construct
  source 1..50: mol_type = other DNA
ccgaaaaaacaaaatttccctttcttctctaacttctcgatccccgttcg

SEQ ID NO: 50273 - DNA, 50 bp, synthetic construct
  source 1..50: mol_type = other DNA
taaataaaatctatatctaacaaccaaaaaaaaaatcctaccatttacca

SEQ ID NO: 50274 - DNA, 50 bp, synthetic construct
  source 1..50: mol_type = other DNA
taaataaaatctatatctaacaaccaaaaaaaaaatcctaccgtttaccg

SEQ ID NO: 50275 - DNA, 50 bp, synthetic construct
  source 1..50: mol_type = other DNA
aactcaataaaaaaaacaaacaaactaaactaaaactcacaactacaaca

SEQ ID NO: 50276 - DNA, 50 bp, synthetic construct
  source 1..50: mol_type = other DNA
aactcaataaaaaaaacaaacgaactaaactaaaactcacaactacaacg

SEQ ID NO: 50277 - DNA, 50 bp, synthetic construct
  source 1..50: mol_type = other DNA
caataaaaaaaacaaacaaactaaactaaaactcacaactacaacaacca

SEQ ID NO: 50278 - DNA, 50 bp, synthetic construct
  source 1..50: mol_type = other DNA
caataaaaaaaacaaacgaactaaactaaaactcacaactacaacgaccg

SEQ ID NO: 50279 - DNA, 50 bp, synthetic construct
  source 1..50: mol_type = other DNA
tataacatataatatataacatacctaacaaccacaaaacccataaacca

SEQ ID NO: 50280 - DNA, 50 bp, synthetic construct
  source 1..50: mol_type = other DNA
tataacgtataatatataacgtacctaacgaccacaaaacccataaaccg

SEQ ID NO: 50281 - DNA, 50 bp, synthetic construct
  source 1..50: mol_type = other DNA
ccaaaaaatacccacaaacaataaaaaactactacaaatacatctacaca

SEQ ID NO: 50282 - DNA, 50 bp, synthetic construct
  source 1..50: mol_type = other DNA
ccaaaaaatacccgcgaacgataaaaaactactacaaatacgtctacacg

SEQ ID NO: 50283 - DNA, 50 bp, synthetic construct
  source 1..50: mol_type = other DNA
aaaaaataaaaacccaaataaaacaaacacacaaaacaaaaacaacccca

SEQ ID NO: 50284 - DNA, 50 bp, synthetic construct
  source 1..50: mol_type = other DNA
aaaaaataaaaacccgaataaaacgaacgcgcgaaacgaaaacaaccccg

SEQ ID NO: 50285 - DNA, 50 bp, synthetic construct
  source 1..50: mol_type = other DNA
aatattttaactaaactatcacccacatttaaaataaaaaatacaacaca

SEQ ID NO: 50286 - DNA, 50 bp, synthetic construct
  source 1..50: mol_type = other DNA
aatattttaactaaactatcacccacgtttaaaataaaaaatacaacacg

SEQ ID NO: 50287 - DNA, 50 bp, synthetic construct
  source 1..50: mol_type = other DNA
aacatcatttctaatacatatacctaaaacctaacatctcaacctcaaca

SEQ ID NO: 50288 - DNA, 50 bp, synthetic construct
  source 1..50: mol_type = other DNA
aacgtcatttctaatacgtatacctaaaacctaacgtctcgacctcgacg

SEQ ID NO: 50289 - DNA, 50 bp, synthetic construct
  source 1..50: mol_type = other DNA
tataacatcatttctaatacatatacctaaaacctaacatctcaacctca

SEQ ID NO: 50290 - DNA, 50 bp, synthetic construct
  source 1..50: mol_type = other DNA
tataacgtcatttctaatacgtatacctaaaacctaacgtctcgacctcg

SEQ ID NO: 50291 - DNA, 50 bp, synthetic construct
  source 1..50: mol_type = other DNA
accacctataacatcatttctaatacatatacctaaaacctaacatctca

SEQ ID NO: 50292 - DNA, 50 bp, synthetic construct
  source 1..50: mol_type = other DNA
accgcctataacgtcatttctaatacgtatacctaaaacctaacgtctcg

SEQ ID NO: 50293 - DNA, 50 bp, synthetic construct
  source 1..50: mol_type = other DNA
ctaacaccacctataacatcatttctaatacatatacctaaaacctaaca

SEQ ID NO: 50294 - DNA, 50 bp, synthetic construct
  source 1..50: mol_type = other DNA
ctaacaccgcctataacgtcatttctaatacgtatacctaaaacctaacg

SEQ ID NO: 50295 - DNA, 50 bp, synthetic construct
  source 1..50: mol_type = other DNA
atcaaaacaccaaacttcaaatacacataccaaaaataacatcacaaaca

SEQ ID NO: 50296 - DNA, 50 bp, synthetic construct
  source 1..50: mol_type = other DNA
atcgaaacgccaaacttcaaatacacgtaccaaaaataacgtcacaaacg

SEQ ID NO: 50297 - DNA, 50 bp, synthetic construct
  source 1..50: mol_type = other DNA
caaacttcaaatacacataccaaaaataacatcacaaacaataccaaaca

SEQ ID NO: 50298 - DNA, 50 bp, synthetic construct
  source 1..50: mol_type = other DNA
caaacttcaaatacacgtaccaaaaataacgtcacaaacgataccaaacg

SEQ ID NO: 50299 - DNA, 50 bp, synthetic construct
  source 1..50: mol_type = other DNA
atacacataccaaaaataacatcacaaacaataccaaacaaaaatccaca

SEQ ID NO: 50300 - DNA, 50 bp, synthetic construct
  source 1..50: mol_type = other DNA
atacacgtaccaaaaataacgtcacaaacgataccaaacgaaaatccacg

SEQ ID NO: 50301 - DNA, 50 bp, synthetic construct
  source 1..50: mol_type = other DNA
accaaaaataaaaataaacttaccaaccattaccctctttctcaccaaca

SEQ ID NO: 50302 - DNA, 50 bp, synthetic construct
  source 1..50: mol_type = other DNA
accaaaaataaaaataaacttaccgaccattaccctctttctcaccaacg

SEQ ID NO: 50303 - DNA, 50 bp, synthetic construct
  source 1..50: mol_type = other DNA
caccaacaaccctataataacaacaacaataaaccaaaaaccaataaaca

SEQ ID NO: 50304 - DNA, 50 bp, synthetic construct
  source 1..50: mol_type = other DNA
cgccaacaaccctataataacgacgacgataaaccaaaaaccaataaacg

SEQ ID NO: 50305 - DNA, 50 bp, synthetic construct
  source 1..50: mol_type = other DNA
aataaaaaaaaactccaaaactaaaacaacctactcaaaaaacaaccaca

SEQ ID NO: 50306 - DNA, 50 bp, synthetic construct
  source 1..50: mol_type = other DNA
aataaaaaaaaactccaaaactaaaacgacctactcgaaaaacgaccgcg

SEQ ID NO: 50307 - DNA, 50 bp, synthetic construct
  source 1..50: mol_type = other DNA
acaataaaaaaaaactccaaaactaaaacaacctactcaaaaaacaacca

SEQ ID NO: 50308 - DNA, 50 bp, synthetic construct
  source 1..50: mol_type = other DNA
acaataaaaaaaaactccaaaactaaaacgacctactcgaaaaacgaccg

SEQ ID NO: 50309 - DNA, 50 bp, synthetic construct
  source 1..50: mol_type = other DNA
actaatctaaaaaaaatattttaatcatatctaccatattttcctaaaca

SEQ ID NO: 50310 - DNA, 50 bp, synthetic construct
  source 1..50: mol_type = other DNA
actaatctaaaaaaaatattttaatcatatctaccgtattttcctaaacg

SEQ ID NO: 50311 - DNA, 50 bp, synthetic construct
  source 1..50: mol_type = other DNA
ataaacttatattaaaaataaaataactcaacaaaacacaataactcaca

SEQ ID NO: 50312 - DNA, 50 bp, synthetic construct
  source 1..50: mol_type = other DNA
ataaacttatattaaaaataaaataactcgacgaaacgcgataactcacg

SEQ ID NO: 50313 - DNA, 50 bp, synthetic construct
  source 1..50: mol_type = other DNA
ttaaaccacattccactccacctcctttatcaaaaaatttcacaaaaaca

SEQ ID NO: 50314 - DNA, 50 bp, synthetic construct
  source 1..50: mol_type = other DNA
ttaaaccacattccactccgcctcctttatcgaaaaatttcacaaaaacg

SEQ ID NO: 50315 - DNA, 50 bp, synthetic construct
  source 1..50: mol_type = other DNA
ccctcccaaaactcactatttaaacaaatattaaacatcactaaacacca

SEQ ID NO: 50316 - DNA, 50 bp, synthetic construct
  source 1..50: mol_type = other DNA
ccctcccaaaactcactatttaaacaaatattaaacgtcgctaaacgccg

SEQ ID NO: 50317 - DNA, 50 bp, synthetic construct
  source 1..50: mol_type = other DNA
tcccaaaactcactatttaaacaaatattaaacatcactaaacaccaaca

SEQ ID NO: 50318 - DNA, 50 bp, synthetic construct
  source 1..50: mol_type = other DNA
tcccaaaactcactatttaaacaaatattaaacgtcgctaaacgccgacg

SEQ ID NO: 50319 - DNA, 50 bp, synthetic construct
  source 1..50: mol_type = other DNA
cctaaatcacataatacacacacaccaaaaacacacaataaaaaaaaaca

SEQ ID NO: 50320 - DNA, 50 bp, synthetic construct
  source 1..50: mol_type = other DNA
cctaaatcacgtaatacgcacgcgccaaaaacacacgataaaaaaaaacg

SEQ ID NO: 50321 - DNA, 50 bp, synthetic construct
  source 1..50: mol_type = other DNA
tttaaaaaccacaataaacccacattttcctttatcatatacctttaaca

SEQ ID NO: 50322 - DNA, 50 bp, synthetic construct
  source 1..50: mol_type = other DNA
tttaaaaaccacgataaacccgcgttttcctttatcgtatacctttaacg

SEQ ID NO: 50323 - DNA, 50 bp, synthetic construct
  source 1..50: mol_type = other DNA
acttccctcaaaccaaaactaataaactcctaaatcacataatacacaca

SEQ ID NO: 50324 - DNA, 50 bp, synthetic construct
  source 1..50: mol_type = other DNA
gcttccctcaaaccgaaactaataaactcctaaatcacgtaatacgcacg

SEQ ID NO: 50325 - DNA, 50 bp, synthetic construct
  source 1..50: mol_type = other DNA
aaacacttccctcaaaccaaaactaataaactcctaaatcacataataca

SEQ ID NO: 50326 - DNA, 50 bp, synthetic construct
  source 1..50: mol_type = other DNA
aaacgcttccctcaaaccgaaactaataaactcctaaatcacgtaatacg

SEQ ID NO: 50327 - DNA, 50 bp, synthetic construct
  source 1..50: mol_type = other DNA
aaacactataatttccaccacatttataaccacattaaatctaaatacca

SEQ ID NO: 50328 - DNA, 50 bp, synthetic construct
  source 1..50: mol_type = other DNA
aaacactataatttccgccgcgtttataaccgcgttaaatctaaataccg

SEQ ID NO: 50329 - DNA, 50 bp, synthetic construct
  source 1..50: mol_type = other DNA
cccaaacaatttttaatcttaaaaacaaaaaccaaacacaataactcaca

SEQ ID NO: 50330 - DNA, 50 bp, synthetic construct
  source 1..50: mol_type = other DNA
cccaaacaatttttaatcttaaaaacgaaaaccgaacgcgataactcacg

SEQ ID NO: 50331 - DNA, 50 bp, synthetic construct
  source 1..50: mol_type = other DNA
ttaatcaaacaactctcaaactcctaaacccaaataatccaccttcctca

SEQ ID NO: 50332 - DNA, 50 bp, synthetic construct
  source 1..50: mol_type = other DNA
ttaatcaaacaactctcgaactcctaaacccaaataatccaccttcctcg

SEQ ID NO: 50333 - DNA, 50 bp, synthetic construct
  source 1..50: mol_type = other DNA
caacccaaatttcacatctatccactcaaaaaacctacttaacacaaaca

SEQ ID NO: 50334 - DNA, 50 bp, synthetic construct
  source 1..50: mol_type = other DNA
cgacccaaatttcacgtctatccactcaaaaaacctacttaacgcaaacg

SEQ ID NO: 50335 - DNA, 50 bp, synthetic construct
  source 1..50: mol_type = other DNA
actcaatactcaaactaactccaaaaccataaattcaacatacaaaaaca

SEQ ID NO: 50336 - DNA, 50 bp, synthetic construct
  source 1..50: mol_type = other DNA
actcaatactcgaactaactccaaaaccgtaaattcgacatacaaaaacg

SEQ ID NO: 50337 - DNA, 50 bp, synthetic construct
  source 1..50: mol_type = other DNA
tcaaactaactccaaaaccataaattcaacatacaaaaacaaaaaaaaca

SEQ ID NO: 50338 - DNA, 50 bp, synthetic construct
  source 1..50: mol_type = other DNA
tcgaactaactccaaaaccgtaaattcgacatacaaaaacgaaaaaaacg

SEQ ID NO: 50339 - DNA, 50 bp, synthetic construct
  source 1..50: mol_type = other DNA
ttcaacatacaaaaacaaaaaaaacacaactaataccccaaaaacaatca

SEQ ID NO: 50340 - DNA, 50 bp, synthetic construct
  source 1..50: mol_type = other DNA
ttcgacatacaaaaacgaaaaaaacgcgactaataccccgaaaacaatcg

SEQ ID NO: 50341 - DNA, 50 bp, synthetic construct
  source 1..50: mol_type = other DNA
ctcactccaaacacataccataacaaaacaattcaaataacccacaaaca

SEQ ID NO: 50342 - DNA, 50 bp, synthetic construct
  source 1..50: mol_type = other DNA
ctcgctccaaacacgtaccataacaaaacaattcaaataacccacaaacg

SEQ ID NO: 50343 - DNA, 50 bp, synthetic construct
  source 1..50: mol_type = other DNA
taatacatacctaaaacaaacaaacacaacccaaatttaatctaaaacca

SEQ ID NO: 50344 - DNA, 50 bp, synthetic construct
  source 1..50: mol_type = other DNA
taatacgtacctaaaacgaacaaacgcgacccgaatttaatctaaaaccg

SEQ ID NO: 50345 - DNA, 50 bp, synthetic construct
  source 1..50: mol_type = other DNA
acatccaaacaaaaatacaaacaccacaaaactcaatccaacttcaacca

SEQ ID NO: 50346 - DNA, 50 bp, synthetic construct
  source 1..50: mol_type = other DNA
acgtccaaacgaaaatacaaacaccacaaaactcaatccaacttcaaccg

SEQ ID NO: 50347 - DNA, 50 bp, synthetic construct
  source 1..50: mol_type = other DNA
cctctatccctaaaaaaccccaactaaacccaacactctaaaactattca

SEQ ID NO: 50348 - DNA, 50 bp, synthetic construct
  source 1..50: mol_type = other DNA
cctctatccctaaaaaaccccaactaaacccgacactctaaaactattcg

SEQ ID NO: 50349 - DNA, 50 bp, synthetic construct
  source 1..50: mol_type = other DNA
caaaaataaaaaccataaacaacaatacaaatattaaccacatctaacca

SEQ ID NO: 50350 - DNA, 50 bp, synthetic construct
  source 1..50: mol_type = other DNA
caaaaataaaaaccgtaaacaacaatacgaatattaaccgcgtctaaccg

SEQ ID NO: 50351 - DNA, 50 bp, synthetic construct
  source 1..50: mol_type = other DNA
caaatccaacaacacacaaaccaaataaaaaatcaaaaactaaaactcca

SEQ ID NO: 50352 - DNA, 50 bp, synthetic construct
  source 1..50: mol_type = other DNA
cgaatccaacaacgcacgaaccaaataaaaaatcaaaaactaaaactccg

SEQ ID NO: 50353 - DNA, 50 bp, synthetic construct
  source 1..50: mol_type = other DNA
gtagagtaagatggaaaatttttaatgtttttgtatttaaggttgtattt

SEQ ID NO: 50354 - DNA, 50 bp, synthetic construct
  source 1..50: mol_type = other DNA
gtagagtaagatggaaaatttttaacgtttttgtatttaaggttgtattc

SEQ ID NO: 50355 - DNA, 50 bp, synthetic construct
  source 1..50: mol_type = other DNA
acctaaattaaacaaatttcctacaaatcaacaaaaacacaaaaacaaca

SEQ ID NO: 50356 - DNA, 50 bp, synthetic construct
  source 1..50: mol_type = other DNA
acctaaattaaacgaatttcctacaaatcaacgaaaacgcgaaaacaacg

SEQ ID NO: 50357 - DNA, 50 bp, synthetic construct
  source 1..50: mol_type = other DNA
attttaaatttccaaaaaaaaatctccaaacccttttcataaccaccaca

SEQ ID NO: 50358 - DNA, 50 bp, synthetic construct
  source 1..50: mol_type = other DNA
attttaaatttccaaaaaaaaatctccaaacccttttcataaccgccgcg

SEQ ID NO: 50359 - DNA, 50 bp, synthetic construct
  source 1..50: mol_type = other DNA
actaactaataacacccaaaaacaaccaaaaacaaaaaactaaaaaacca

SEQ ID NO: 50360 - DNA, 50 bp, synthetic construct
  source 1..50: mol_type = other DNA
actaactaataacgcccaaaaacgaccgaaaacaaaaaactaaaaaaccg

SEQ ID NO: 50361 - DNA, 50 bp, synthetic construct
  source 1..50: mol_type = other DNA
ttactccaaacctaacaaaaaatctatctcaatcacaattctccccaaca

SEQ ID NO: 50362 - DNA, 50 bp, synthetic construct
  source 1..50: mol_type = other DNA
ttactccaaacctaacgaaaaatctatctcaatcacgattctccccaacg

SEQ ID NO: 50363 - DNA, 50 bp, synthetic construct
  source 1..50: mol_type = other DNA
aatttctaccatttatacttcatcctacactaaaaaaaatacacccacca

SEQ ID NO: 50364 - DNA, 50 bp, synthetic construct
  source 1..50: mol_type = other DNA
aatttctaccatttatacttcatcctacactaaaaaaaatacgcccgccg

SEQ ID NO: 50365 - DNA, 50 bp, synthetic construct
  source 1..50: mol_type = other DNA
taaaccaatataccctatacaaaacaaaaaatacacccaatcactccaca

SEQ ID NO: 50366 - DNA, 50 bp, synthetic construct
  source 1..50: mol_type = other DNA
taaaccaatataccctatacaaaacgaaaaatacacccgatcactccgcg

SEQ ID NO: 50367 - DNA, 50 bp, synthetic construct
  source 1..50: mol_type = other DNA
taaaccttaatccaccctatacaaaaaaaaattccacaaccccccaaaca

SEQ ID NO: 50368 - DNA, 50 bp, synthetic construct
  source 1..50: mol_type = other DNA
taaaccttaatccaccctatacgaaaaaaaattccacaaccccccgaacg

SEQ ID NO: 50369 - DNA, 50 bp, synthetic construct
  source 1..50: mol_type = other DNA
aaaggtatttgttttttaattgggaatgttttaagttgtttttaagtttt

SEQ ID NO: 50370 - DNA, 50 bp, synthetic construct
  source 1..50: mol_type = other DNA
aaaggtatttgttttttaattgggaatgttttaagttgtttttaagtttc

SEQ ID NO: 50371 - DNA, 50 bp, synthetic construct
  source 1..50: mol_type = other DNA
taaacaaaaacaaatatctaaataaataaaactcaacacttaatataaca

SEQ ID NO: 50372 - DNA, 50 bp, synthetic construct
  source 1..50: mol_type = other DNA
taaacaaaaacaaatatctaaataaataaaactcaacacttaatataacg

SEQ ID NO: 50373 - DNA, 50 bp, synthetic construct
  source 1..50: mol_type = other DNA
ataccccaaaacttaaaatataataaaaaatataacaaacataattcaca

SEQ ID NO: 50374 - DNA, 50 bp, synthetic construct
  source 1..50: mol_type = other DNA
ataccccaaaacttaaaatataataaaaaatataacaaacataattcacg

SEQ ID NO: 50375 - DNA, 50 bp, synthetic construct
  source 1..50: mol_type = other DNA
ataaacccaaaaaacacattccctcccaattcctacaaaatcccaaacca

SEQ ID NO: 50376 - DNA, 50 bp, synthetic construct
  source 1..50: mol_type = other DNA
ataaacccaaaaaacacattccctcccaattcctacaaaatcccgaaccg

SEQ ID NO: 50377 - DNA, 50 bp, synthetic construct
  source 1..50: mol_type = other DNA
cccaaatttaaaaacaatcaaacaaaatcaaaaccaaacaacaaaacaca

SEQ ID NO: 50378 - DNA, 50 bp, synthetic construct
  source 1..50: mol_type = other DNA
cccaaatttaaaaacgatcaaacgaaatcaaaaccaaacaacgaaacgcg

SEQ ID NO: 50379 - DNA, 50 bp, synthetic construct
  source 1..50: mol_type = other DNA
atgtgatatatatgtattatatatatatgttattgggtttgtgaatttgt

SEQ ID NO: 50380 - DNA, 50 bp, synthetic construct
  source 1..50: mol_type = other DNA
atgtgatatatatgtattatatatatatgttattgggtttgtgaatttgc

SEQ ID NO: 50381 - DNA, 50 bp, synthetic construct
  source 1..50: mol_type = other DNA
cctaactaaacaatcacaaacttaaatccataacttacctctcaacacca

SEQ ID NO: 50382 - DNA, 50 bp, synthetic construct
  source 1..50: mol_type = other DNA
cctaactaaacaatcgcgaacttaaatccgtaacttacctctcaacaccg

SEQ ID NO: 50383 - DNA, 50 bp, synthetic construct
  source 1..50: mol_type = other DNA
aaaaacacaaaaaactctaaaaaaccaaaaacccaaaccaaccaaaacca

SEQ ID NO: 50384 - DNA, 50 bp, synthetic construct
  source 1..50: mol_type = other DNA
aaaaacgcaaaaaactctaaaaaaccgaaaacccaaaccaaccaaaaccg

SEQ ID NO: 50385 - DNA, 50 bp, synthetic construct
  source 1..50: mol_type = other DNA
ttttttaaaatctttaaaacttaataaaaatcaactttaaaccaaacaca

SEQ ID NO: 50386 - DNA, 50 bp, synthetic construct
  source 1..50: mol_type = other DNA
ttttttaaaatctttaaaacttaataaaaatcgactttaaaccgaacacg

SEQ ID NO: 50387 - DNA, 50 bp, synthetic construct
  source 1..50: mol_type = other DNA
ccaaattcatatcattctcctaccccaacctataactaaaactacaaaca

SEQ ID NO: 50388 - DNA, 50 bp, synthetic construct
  source 1..50: mol_type = other DNA
ccgaattcatatcattctcctaccccaacctataactaaaactacaaacg

SEQ ID NO: 50389 - DNA, 50 bp, synthetic construct
  source 1..50: mol_type = other DNA
caacaatacaaaaaaccacatatcaaacccatacatatacataaaaatca

SEQ ID NO: 50390 - DNA, 50 bp, synthetic construct
  source 1..50: mol_type = other DNA
cgacaatacgaaaaaccgcatatcgaacccgtacgtatacgtaaaaatcg

SEQ ID NO: 50391 - DNA, 50 bp, synthetic construct
  source 1..50: mol_type = other DNA
acaatacaaaaaaccacatatcaaacccatacatatacataaaaatcaca

SEQ ID NO: 50392 - DNA, 50 bp, synthetic construct
  source 1..50: mol_type = other DNA
acaatacgaaaaaccgcatatcgaacccgtacgtatacgtaaaaatcgcg

SEQ ID NO: 50393 - DNA, 50 bp, synthetic construct
  source 1..50: mol_type = other DNA
tatcaaacccatacatatacataaaaatcacatataaccataaacacaca

SEQ ID NO: 50394 - DNA, 50 bp, synthetic construct
  source 1..50: mol_type = other DNA
tatcgaacccgtacgtatacgtaaaaatcgcgtataaccataaacacacg

SEQ ID NO: 50395 - DNA, 50 bp, synthetic construct
  source 1..50: mol_type = other DNA
aaacccatacatatacataaaaatcacatataaccataaacacacaaaca

SEQ ID NO: 50396 - DNA, 50 bp, synthetic construct
  source 1..50: mol_type = other DNA
gaacccgtacgtatacgtaaaaatcgcgtataaccataaacacacgaacg

SEQ ID NO: 50397 - DNA, 50 bp, synthetic construct
  source 1..50: mol_type = other DNA
atacatatacataaaaatcacatataaccataaacacacaaacatacaca

SEQ ID NO: 50398 - DNA, 50 bp, synthetic construct
  source 1..50: mol_type = other DNA
gtacgtatacgtaaaaatcgcgtataaccataaacacacgaacgtacacg

SEQ ID NO: 50399 - DNA, 50 bp, synthetic construct
  source 1..50: mol_type = other DNA
aaaatcacatataaccataaacacacaaacatacacacacaaaaactaca

SEQ ID NO: 50400 - DNA, 50 bp, synthetic construct
  source 1..50: mol_type = other DNA
aaaatcgcgtataaccataaacacacgaacgtacacgcacgaaaactacg

SEQ ID NO: 50401 - DNA, 50 bp, synthetic construct
  source 1..50: mol_type = other DNA
cataaacacacaaacatacacacacaaaaactacatatactatactaaca

SEQ ID NO: 50402 - DNA, 50 bp, synthetic construct
  source 1..50: mol_type = other DNA
cataaacacacgaacgtacacgcacgaaaactacgtatactatactaacg

SEQ ID NO: 50403 - DNA, 50 bp, synthetic construct
  source 1..50: mol_type = other DNA
aaacatacacacacaaaaactacatatactatactaacataaaaaataca

SEQ ID NO: 50404 - DNA, 50 bp, synthetic construct
  source 1..50: mol_type = other DNA
gaacgtacacgcacgaaaactacgtatactatactaacgtaaaaaatacg

SEQ ID NO: 50405 - DNA, 50 bp, synthetic construct
  source 1..50: mol_type = other DNA
atacacacacaaaaactacatatactatactaacataaaaaatacaaaca

SEQ ID NO: 50406 - DNA, 50 bp, synthetic construct
  source 1..50: mol_type = other DNA
gtacacgcacgaaaactacgtatactatactaacgtaaaaaatacgaacg

SEQ ID NO: 50407 - DNA, 50 bp, synthetic construct
  source 1..50: mol_type = other DNA
aaaactacatatactatactaacataaaaaatacaaacaaaataaccaca

SEQ ID NO: 50408 - DNA, 50 bp, synthetic construct
  source 1..50: mol_type = other DNA
aaaactacgtatactatactaacgtaaaaaatacgaacgaaataaccgcg

SEQ ID NO: 50409 - DNA, 50 bp, synthetic construct
  source 1..50: mol_type = other DNA
tccaaaaacaaaaaacaacccaactaaaacacaaaaccaaactaaaacca

SEQ ID NO: 50410 - DNA, 50 bp, synthetic construct
  source 1..50: mol_type = other DNA
tccgaaaacgaaaaacaacccgactaaaacgcgaaaccaaactaaaaccg

SEQ ID NO: 50411 - DNA, 50 bp, synthetic construct
  source 1..50: mol_type = other DNA
ttaccaaaattaaaacatccaaaaacaaaaaacaacccaactaaaacaca

SEQ ID NO: 50412 - DNA, 50 bp, synthetic construct
  source 1..50: mol_type = other DNA
ttaccgaaattaaaacgtccgaaaacgaaaaacaacccgactaaaacgcg

SEQ ID NO: 50413 - DNA, 50 bp, synthetic construct
  source 1..50: mol_type = other DNA
caaaacaaaatttaccaaaattaaaacatccaaaaacaaaaaacaaccca

SEQ ID NO: 50414 - DNA, 50 bp, synthetic construct
  source 1..50: mol_type = other DNA
cgaaacaaaatttaccgaaattaaaacgtccgaaaacgaaaaacaacccg

SEQ ID NO: 50415 - DNA, 50 bp, synthetic construct
  source 1..50: mol_type = other DNA
cacattttcaactatataaataatactaccccctaacccttaccctccca

SEQ ID NO: 50416 - DNA, 50 bp, synthetic construct
  source 1..50: mol_type = other DNA
cacgttttcaactatataaataatactaccccctaacccttaccctcccg

SEQ ID NO: 50417 - DNA, 50 bp, synthetic construct
  source 1..50: mol_type = other DNA
aacaaaaaaacaaaaaccaaaaaacaacatcattcacacaattaaaaaca

SEQ ID NO: 50418 - DNA, 50 bp, synthetic construct
  source 1..50: mol_type = other DNA
aacgaaaaaacaaaaaccaaaaaacaacatcattcacacaattaaaaacg

SEQ ID NO: 50419 - DNA, 50 bp, synthetic construct
  source 1..50: mol_type = other DNA
ttctaccaaccccccatataactcacctaaaaccacacctataaaaaaca

SEQ ID NO: 50420 - DNA, 50 bp, synthetic construct
  source 1..50: mol_type = other DNA
ttctaccaaccccccatataactcacctaaaaccgcacctataaaaaacg

SEQ ID NO: 50421 - DNA, 50 bp, synthetic construct
  source 1..50: mol_type = other DNA
aaaaaaaaacaacataccctttctactctacccacactataaaaacacca

SEQ ID NO: 50422 - DNA, 50 bp, synthetic construct
  source 1..50: mol_type = other DNA
aaaaaaaaacaacataccctttctactctacccacgctataaaaacaccg

SEQ ID NO: 50423 - DNA, 50 bp, synthetic construct
  source 1..50: mol_type = other DNA
aaaacaacataccctttctactctacccacactataaaaacaccaaacca

SEQ ID NO: 50424 - DNA, 50 bp, synthetic construct
  source 1..50: mol_type = other DNA
aaaacaacataccctttctactctacccacgctataaaaacaccgaaccg

SEQ ID NO: 50425 - DNA, 50 bp, synthetic construct
  source 1..50: mol_type = other DNA
aatacaataacacaatcttaattcaatcctacacctcccaaattcaaaca

SEQ ID NO: 50426 - DNA, 50 bp, synthetic construct
  source 1..50: mol_type = other DNA
aatacaataacgcaatcttaattcaatcctacgcctcccaaattcaaacg

SEQ ID NO: 50427 - DNA, 50 bp, synthetic construct
  source 1..50: mol_type = other DNA
actccccattctatacttaaaatcaaacatacccttacataacacaatca

SEQ ID NO: 50428 - DNA, 50 bp, synthetic construct
  source 1..50: mol_type = other DNA
actccccgttctatacttaaaatcaaacgtacccttacgtaacacaatcg

SEQ ID NO: 50429 - DNA, 50 bp, synthetic construct
  source 1..50: mol_type = other DNA
actaaacatccaaatacacaactcctctaataaacaccaaaaacctctca

SEQ ID NO: 50430 - DNA, 50 bp, synthetic construct
  source 1..50: mol_type = other DNA
actaaacatccaaatacacgactcctctaataaacaccgaaaacctctcg

SEQ ID NO: 50431 - DNA, 50 bp, synthetic construct
  source 1..50: mol_type = other DNA
taactaaaccacctcacaaactaaaaaccacaccaaatactcaaaaaaca

SEQ ID NO: 50432 - DNA, 50 bp, synthetic construct
  source 1..50: mol_type = other DNA
taactaaaccacctcacaaactaaaaaccacaccgaatactcgaaaaacg

SEQ ID NO: 50433 - DNA, 50 bp, synthetic construct
  source 1..50: mol_type = other DNA
ccctactaaaactatacacaaaataacaatcctcaaaccaatcctcccca

SEQ ID NO: 50434 - DNA, 50 bp, synthetic construct
  source 1..50: mol_type = other DNA
ccctactaaaactatacacaaaataacgatcctcaaaccaatcctccccg

SEQ ID NO: 50435 - DNA, 50 bp, synthetic construct
  source 1..50: mol_type = other DNA
aaacctaactcctaaataaaccaacaccacaaactccttaataacacaca

SEQ ID NO: 50436 - DNA, 50 bp, synthetic construct
  source 1..50: mol_type = other DNA
aaacctaactcctaaataaaccaacaccgcgaactccttaataacacacg

SEQ ID NO: 50437 - DNA, 50 bp, synthetic construct
  source 1..50: mol_type = other DNA
ccaaaacataaaactcaacattctcaaaacatatatcaccaaaaaaccca

SEQ ID NO: 50438 - DNA, 50 bp, synthetic construct
  source 1..50: mol_type = other DNA
ccaaaacgtaaaactcgacattctcaaaacgtatatcaccaaaaaacccg

SEQ ID NO: 50439 - DNA, 50 bp, synthetic construct
  source 1..50: mol_type = other DNA
aaaacataaaactcaacattctcaaaacatatatcaccaaaaaacccaca

SEQ ID NO: 50440 - DNA, 50 bp, synthetic construct
  source 1..50: mol_type = other DNA
aaaacgtaaaactcgacattctcaaaacgtatatcaccaaaaaacccgcg

SEQ ID NO: 50441 - DNA, 50 bp, synthetic construct
  source 1..50: mol_type = other DNA
caacaccaaattacactacaaaaataacaactacaactccaataataaca

SEQ ID NO: 50442 - DNA, 50 bp, synthetic construct
  source 1..50: mol_type = other DNA
cgacaccgaattacgctacgaaaataacgactacaactccaataataacg

SEQ ID NO: 50443 - DNA, 50 bp, synthetic construct
  source 1..50: mol_type = other DNA
taacttctctaaaaacccaacacccaataaaaataaaaactaaatccaca

SEQ ID NO: 50444 - DNA, 50 bp, synthetic construct
  source 1..50: mol_type = other DNA
taacttctctaaaaacccgacacccaataaaaataaaaactaaatccgcg

SEQ ID NO: 50445 - DNA, 50 bp, synthetic construct
  source 1..50: mol_type = other DNA
tcaaaaaacaaaacaaccccaaaaaaacaacccaaaatctcaaaaactca

SEQ ID NO: 50446 - DNA, 50 bp, synthetic construct
  source 1..50: mol_type = other DNA
tcaaaaaacgaaacaaccccaaaaaaacaacccgaaatctcgaaaactcg

SEQ ID NO: 50447 - DNA, 50 bp, synthetic construct
  source 1..50: mol_type = other DNA
acactaccaaacaaacttctctacaaactaaacacttcaaaaattcaaca

SEQ ID NO: 50448 - DNA, 50 bp, synthetic construct
  source 1..50: mol_type = other DNA
acactaccgaacgaacttctctacgaactaaacgcttcaaaaattcgacg

SEQ ID NO: 50449 - DNA, 50 bp, synthetic construct
  source 1..50: mol_type = other DNA
caatctaaaaacaaaacaaaataactcacacctataataccaactactca

SEQ ID NO: 50450 - DNA, 50 bp, synthetic construct
  source 1..50: mol_type = other DNA
caatctaaaaacaaaacgaaataactcacacctataataccaactactcg

SEQ ID NO: 50451 - DNA, 50 bp, synthetic construct
  source 1..50: mol_type = other DNA
aacccaacttaaatcacaaaacccaaattaacaaccaaaaaaaaccacca

SEQ ID NO: 50452 - DNA, 50 bp, synthetic construct
  source 1..50: mol_type = other DNA
aacccgacttaaatcacaaaacccgaattaacaaccaaaaaaaaccaccg

SEQ ID NO: 50453 - DNA, 50 bp, synthetic construct
  source 1..50: mol_type = other DNA
atcccaaaatcaaaaattcaaaaccaacctaacaaacataaaaaaaccca

SEQ ID NO: 50454 - DNA, 50 bp, synthetic construct
  source 1..50: mol_type = other DNA
atcccgaaatcaaaaattcgaaaccaacctaacgaacataaaaaaacccg

SEQ ID NO: 50455 - DNA, 50 bp, synthetic construct
  source 1..50: mol_type = other DNA
acaaaaaaatccaaaataaacatccaattcaaaaaataaaacattacaca

SEQ ID NO: 50456 - DNA, 50 bp, synthetic construct
  source 1..50: mol_type = other DNA
acgaaaaaatccaaaataaacatccaattcaaaaaataaaacattacgcg

SEQ ID NO: 50457 - DNA, 50 bp, synthetic construct
  source 1..50: mol_type = other DNA
taatttcataattaaaatttcacaaaatactaaatcaaaatactttacca

SEQ ID NO: 50458 - DNA, 50 bp, synthetic construct
  source 1..50: mol_type = other DNA
taatttcgtaattaaaatttcacaaaatactaaatcaaaatactttaccg

SEQ ID NO: 50459 - DNA, 50 bp, synthetic construct
  source 1..50: mol_type = other DNA
aaaaaaatacataaatttcaaaaaatatttctaaaaatcaccacaataca

SEQ ID NO: 50460 - DNA, 50 bp, synthetic construct
  source 1..50: mol_type = other DNA
aaaaaaatacataaatttcgaaaaatatttctaaaaatcaccacaatacg

SEQ ID NO: 50461 - DNA, 50 bp, synthetic construct
  source 1..50: mol_type = other DNA
taattttaaaattaaaatcacactataataatttccaaaaacattttcca

SEQ ID NO: 50462 - DNA, 50 bp, synthetic construct
  source 1..50: mol_type = other DNA
taattttaaaattaaaatcgcactataataatttccaaaaacattttccg

SEQ ID NO: 50463 - DNA, 50 bp, synthetic construct
  source 1..50: mol_type = other DNA
ttttcaacctataatttaataaccaccaccaaataacataaaacatccca

SEQ ID NO: 50464 - DNA, 50 bp, synthetic construct
  source 1..50: mol_type = other DNA
ttttcaacctataatttaataaccgccgccgaataacgtaaaacgtcccg

SEQ ID NO: 50465 - DNA, 50 bp, synthetic construct
  source 1..50: mol_type = other DNA
ccaaattttcaacctataatttaataaccaccaccaaataacataaaaca

SEQ ID NO: 50466 - DNA, 50 bp, synthetic construct
  source 1..50: mol_type = other DNA
ccaaattttcaacctataatttaataaccgccgccgaataacgtaaaacg

SEQ ID NO: 50467 - DNA, 50 bp, synthetic construct
  source 1..50: mol_type = other DNA
cctttctccaaattttcaacctataatttaataaccaccaccaaataaca

SEQ ID NO: 50468 - DNA, 50 bp, synthetic construct
  source 1..50: mol_type = other DNA
cctttctccaaattttcaacctataatttaataaccgccgccgaataacg

SEQ ID NO: 50469 - DNA, 50 bp, synthetic construct
  source 1..50: mol_type = other DNA
acccaacaacaattatcaaatcacaaactaaaaacctaaaaaaaaatcca

SEQ ID NO: 50470 - DNA, 50 bp, synthetic construct
  source 1..50: mol_type = other DNA
acccgacgacgattatcaaatcacaaactaaaaacctaaaaaaaaatccg

SEQ ID NO: 50471 - DNA, 50 bp, synthetic construct
  source 1..50: mol_type = other DNA
tactaattaactcctcaaaaaacaaacaaaactaaacattaaaccaaaca

SEQ ID NO: 50472 - DNA, 50 bp, synthetic construct
  source 1..50: mol_type = other DNA
tactaattaactcctcgaaaaacaaacgaaactaaacgttaaaccgaacg

SEQ ID NO: 50473 - DNA, 50 bp, synthetic construct
  source 1..50: mol_type = other DNA
cacatactaattaactcctcaaaaaacaaacaaaactaaacattaaacca

SEQ ID NO: 50474 - DNA, 50 bp, synthetic construct
  source 1..50: mol_type = other DNA
cgcgtactaattaactcctcgaaaaacaaacgaaactaaacgttaaaccg

SEQ ID NO: 50475 - DNA, 50 bp, synthetic construct
  source 1..50: mol_type = other DNA
ctcaaaaccacatactaattaactcctcaaaaaacaaacaaaactaaaca

SEQ ID NO: 50476 - DNA, 50 bp, synthetic construct
  source 1..50: mol_type = other DNA
ctcgaaaccgcgtactaattaactcctcgaaaaacaaacgaaactaaacg

SEQ ID NO: 50477 - DNA, 50 bp, synthetic construct
  source 1..50: mol_type = other DNA
aaatatacccttcaaaaactacacacactcttcatctttcctaactacca

SEQ ID NO: 50478 - DNA, 50 bp, synthetic construct
  source 1..50: mol_type = other DNA
aaatatacccttcgaaaactacacgcgctcttcatctttcctaactaccg

SEQ ID NO: 50479 - DNA, 50 bp, synthetic construct
  source 1..50: mol_type = other DNA
aaacttcacataaaaaaaaaccctaaaatatacccttcaaaaactacaca

SEQ ID NO: 50480 - DNA, 50 bp, synthetic construct
  source 1..50: mol_type = other DNA
aaacttcgcgtaaaaaaaaaccctaaaatatacccttcgaaaactacacg

SEQ ID NO: 50481 - DNA, 50 bp, synthetic construct
  source 1..50: mol_type = other DNA
taaaaaaacaataccactcaatcactaacaacacaattaaaaaaacaaca

SEQ ID NO: 50482 - DNA, 50 bp, synthetic construct
  source 1..50: mol_type = other DNA
taaaaaaacgataccactcgatcgctaacgacgcaattaaaaaaacaacg

SEQ ID NO: 50483 - DNA, 50 bp, synthetic construct
  source 1..50: mol_type = other DNA
attaatttattataaaactattaatcaataacattacccttttaattaca

SEQ ID NO: 50484 - DNA, 50 bp, synthetic construct
  source 1..50: mol_type = other DNA
attaatttattataaaactattaatcaataacgttacccttttaattacg

SEQ ID NO: 50485 - DNA, 50 bp, synthetic construct
  source 1..50: mol_type = other DNA
aaaactattaatcaataacattacccttttaattacatcattaacaacca

SEQ ID NO: 50486 - DNA, 50 bp, synthetic construct
  source 1..50: mol_type = other DNA
aaaactattaatcaataacgttacccttttaattacgtcgttaacgaccg

SEQ ID NO: 50487 - DNA, 50 bp, synthetic construct
  source 1..50: mol_type = other DNA
ttcattcaaaactaaaactcaaacactaacattaactcctaaaccaaaca

SEQ ID NO: 50488 - DNA, 50 bp, synthetic construct
  source 1..50: mol_type = other DNA
ttcattcgaaactaaaactcgaacgctaacgttaactcctaaaccgaacg

SEQ ID NO: 50489 - DNA, 50 bp, synthetic construct
  source 1..50: mol_type = other DNA
acaaacccaaaaaaaaacccaaaaataatacactaaaaaaaacaacccca

SEQ ID NO: 50490 - DNA, 50 bp, synthetic construct
  source 1..50: mol_type = other DNA
acgaacccgaaaaaaaacccaaaaataatacgctaaaaaaaacgaccccg

SEQ ID NO: 50491 - DNA, 50 bp, synthetic construct
  source 1..50: mol_type = other DNA
aaaaacaatatttccactacaaacccaaaaaaaaacccaaaaataataca

SEQ ID NO: 50492 - DNA, 50 bp, synthetic construct
  source 1..50: mol_type = other DNA
aaaaacaatatttccactacgaacccgaaaaaaaacccaaaaataatacg

SEQ ID NO: 50493 - DNA, 50 bp, synthetic construct
  source 1..50: mol_type = other DNA
aactatccttcccttcaaaatcaaaactcttaatcactcataaaacatca

SEQ ID NO: 50494 - DNA, 50 bp, synthetic construct
  source 1..50: mol_type = other DNA
aactatccttcccttcaaaatcgaaactcttaatcactcgtaaaacgtcg

SEQ ID NO: 50495 - DNA, 50 bp, synthetic construct
  source 1..50: mol_type = other DNA
ctaaaacccaatccaaatcaaaaaaataaaacaaatactattaattaaca

SEQ ID NO: 50496 - DNA, 50 bp, synthetic construct
  source 1..50: mol_type = other DNA
ctaaaacccaatccgaatcgaaaaaataaaacgaatactattaattaacg

SEQ ID NO: 50497 - DNA, 50 bp, synthetic construct
  source 1..50: mol_type = other DNA
aaaaaataaaacaaatactattaattaacatacattccaaccaacctaca

SEQ ID NO: 50498 - DNA, 50 bp, synthetic construct
  source 1..50: mol_type = other DNA
aaaaaataaaacgaatactattaattaacgtacattccaaccaacctacg

SEQ ID NO: 50499 - DNA, 50 bp, synthetic construct
  source 1..50: mol_type = other DNA
tacccaataaacactcaaccccaacaacaaaaacaaaacttataaaaaca

SEQ ID NO: 50500 - DNA, 50 bp, synthetic construct
  source 1..50: mol_type = other DNA
tacccaataaacactcaaccccaacgacgaaaacgaaacttataaaaacg

SEQ ID NO: 50501 - DNA, 50 bp, synthetic construct
  source 1..50: mol_type = other DNA
accacaaaattaaccaccttaaaaaactacaaaaataacaaaataaaaca

SEQ ID NO: 50502 - DNA, 50 bp, synthetic construct
  source 1..50: mol_type = other DNA
accgcaaaattaaccaccttaaaaaactacgaaaataacgaaataaaacg

SEQ ID NO: 50503 - DNA, 50 bp, synthetic construct
  source 1..50: mol_type = other DNA
aaaattaaccaccttaaaaaactacaaaaataacaaaataaaacatacca

SEQ ID NO: 50504 - DNA, 50 bp, synthetic construct
  source 1..50: mol_type = other DNA
aaaattaaccaccttaaaaaactacgaaaataacgaaataaaacgtaccg

SEQ ID NO: 50505 - DNA, 50 bp, synthetic construct
  source 1..50: mol_type = other DNA
tacaaaaataacaaaataaaacataccactacaaactaacctctaaacca

SEQ ID NO: 50506 - DNA, 50 bp, synthetic construct
  source 1..50: mol_type = other DNA
tacgaaaataacgaaataaaacgtaccgctacaaactaacctctaaaccg

SEQ ID NO: 50507 - DNA, 50 bp, synthetic construct
  source 1..50: mol_type = other DNA
aataacaaaataaaacataccactacaaactaacctctaaaccaaaaaca

SEQ ID NO: 50508 - DNA, 50 bp, synthetic construct
  source 1..50: mol_type = other DNA
aataacgaaataaaacgtaccgctacaaactaacctctaaaccgaaaacg

SEQ ID NO: 50509 - DNA, 50 bp, synthetic construct
  source 1..50: mol_type = other DNA
acaacccccaaaaaaccaaatacatctattaaaccatacaaaataaacca

SEQ ID NO: 50510 - DNA, 50 bp, synthetic construct
  source 1..50: mol_type = other DNA
acaacccccgaaaaaccgaatacatctattaaaccgtacgaaataaaccg

SEQ ID NO: 50511 - DNA, 50 bp, synthetic construct
  source 1..50: mol_type = other DNA
atctattaaaccatacaaaataaaccaaaaaaaccaataacaataaaaca

SEQ ID NO: 50512 - DNA, 50 bp, synthetic construct
  source 1..50: mol_type = other DNA
atctattaaaccgtacgaaataaaccgaaaaaaccaataacgataaaacg

SEQ ID NO: 50513 - DNA, 50 bp, synthetic construct
  source 1..50: mol_type = other DNA
catacaaaataaaccaaaaaaaccaataacaataaaacaaacaaacacca

SEQ ID NO: 50514 - DNA, 50 bp, synthetic construct
  source 1..50: mol_type = other DNA
cgtacgaaataaaccgaaaaaaccaataacgataaaacgaacaaacgccg

SEQ ID NO: 50515 - DNA, 50 bp, synthetic construct
  source 1..50: mol_type = other DNA
aaccaaaaaaaccaataacaataaaacaaacaaacaccaaaaaaataaca

SEQ ID NO: 50516 - DNA, 50 bp, synthetic construct
  source 1..50: mol_type = other DNA
aaccgaaaaaaccaataacgataaaacgaacaaacgccgaaaaaataacg

SEQ ID NO: 50517 - DNA, 50 bp, synthetic construct
  source 1..50: mol_type = other DNA
ccaataacaataaaacaaacaaacaccaaaaaaataacataacccaaaca

SEQ ID NO: 50518 - DNA, 50 bp, synthetic construct
  source 1..50: mol_type = other DNA
ccaataacgataaaacgaacaaacgccgaaaaaataacgtaacccaaacg

SEQ ID NO: 50519 - DNA, 50 bp, synthetic construct
  source 1..50: mol_type = other DNA
aaaacaaacaaacaccaaaaaaataacataacccaaacaaaccaaataca

SEQ ID NO: 50520 - DNA, 50 bp, synthetic construct
  source 1..50: mol_type = other DNA
aaaacgaacaaacgccgaaaaaataacgtaacccaaacgaaccgaatacg

SEQ ID NO: 50521 - DNA, 50 bp, synthetic construct
  source 1..50: mol_type = other DNA
aacaaacaccaaaaaaataacataacccaaacaaaccaaatacaaaaaca

SEQ ID NO: 50522 - DNA, 50 bp, synthetic construct
  source 1..50: mol_type = other DNA
aacaaacgccgaaaaaataacgtaacccaaacgaaccgaatacgaaaacg

SEQ ID NO: 50523 - DNA, 50 bp, synthetic construct
  source 1..50: mol_type = other DNA
actaaaaacacaacactaaaaaaaaccaaaacaaactaaaaaataaacca

SEQ ID NO: 50524 - DNA, 50 bp, synthetic construct
  source 1..50: mol_type = other DNA
actaaaaacacgacactaaaaaaaaccgaaacgaactaaaaaataaaccg

SEQ ID NO: 50525 - DNA, 50 bp, synthetic construct
  source 1..50: mol_type = other DNA
cacaaaactatatctaacaaccactacttctaccatcaatttatttttca

SEQ ID NO: 50526 - DNA, 50 bp, synthetic construct
  source 1..50: mol_type = other DNA
cacgaaactatatctaacaaccgctacttctaccatcgatttatttttcg

SEQ ID NO: 50527 - DNA, 50 bp, synthetic construct
  source 1..50: mol_type = other DNA
ctctcctctaaacaaactcatcctaaccataaatatcaaaaaactcccca

SEQ ID NO: 50528 - DNA, 50 bp, synthetic construct
  source 1..50: mol_type = other DNA
ctctcctctaaacaaactcatcctaaccgtaaatatcaaaaaactccccg

SEQ ID NO: 50529 - DNA, 50 bp, synthetic construct
  source 1..50: mol_type = other DNA
acaatccctcaaaaccataatcttctccaataaatacaataaaacattca

SEQ ID NO: 50530 - DNA, 50 bp, synthetic construct
  source 1..50: mol_type = other DNA
gcgatccctcgaaaccgtaatcttctccaataaatacaataaaacgttcg

SEQ ID NO: 50531 - DNA, 50 bp, synthetic construct
  source 1..50: mol_type = other DNA
tatcacaatccctcaaaaccataatcttctccaataaatacaataaaaca

SEQ ID NO: 50532 - DNA, 50 bp, synthetic construct
  source 1..50: mol_type = other DNA
tatcgcgatccctcgaaaccgtaatcttctccaataaatacaataaaacg

SEQ ID NO: 50533 - DNA, 50 bp, synthetic construct
  source 1..50: mol_type = other DNA
taaaaaatacactatattccaatacacacaatatcacacaatactcacca

SEQ ID NO: 50534 - DNA, 50 bp, synthetic construct
  source 1..50: mol_type = other DNA
taaaaaatacgctatattccaatacgcacaatatcacgcaatactcgccg

SEQ ID NO: 50535 - DNA, 50 bp, synthetic construct
  source 1..50: mol_type = other DNA
cataaaataaaatacacaaataataaaaaaatcctcaccactcaacccca

SEQ ID NO: 50536 - DNA, 50 bp, synthetic construct
  source 1..50: mol_type = other DNA
cataaaataaaatacgcaaataataaaaaaatcctcgccgctcgaccccg

SEQ ID NO: 50537 - DNA, 50 bp, synthetic construct
  source 1..50: mol_type = other DNA
ttacaacctccataaaataaaatacacaaataataaaaaaatcctcacca

SEQ ID NO: 50538 - DNA, 50 bp, synthetic construct
  source 1..50: mol_type = other DNA
ttacgacctccataaaataaaatacgcaaataataaaaaaatcctcgccg

SEQ ID NO: 50539 - DNA, 50 bp, synthetic construct
  source 1..50: mol_type = other DNA
attaaacatcataaacaatccaaacactaaaatccaaatccacacactca

SEQ ID NO: 50540 - DNA, 50 bp, synthetic construct
  source 1..50: mol_type = other DNA
attaaacatcataaacaatccaaacactaaaatccgaatccgcgcactcg

SEQ ID NO: 50541 - DNA, 50 bp, synthetic construct
  source 1..50: mol_type = other DNA
taatttcccatcccaacaaaaacacacttttttcacacttcacaaataca

SEQ ID NO: 50542 - DNA, 50 bp, synthetic construct
  source 1..50: mol_type = other DNA
taatttcccgtcccaacaaaaacgcgcttttttcacacttcacgaatacg

SEQ ID NO: 50543 - DNA, 50 bp, synthetic construct
  source 1..50: mol_type = other DNA
caaaaatctaaatctccaaaccaacctaaaaatacaacactaacaataca

SEQ ID NO: 50544 - DNA, 50 bp, synthetic construct
  source 1..50: mol_type = other DNA
caaaaatctaaatctccgaaccaacctaaaaatacgacgctaacgatacg

SEQ ID NO: 50545 - DNA, 50 bp, synthetic construct
  source 1..50: mol_type = other DNA
atttcaccatattaatcaaactaatctcaaactcctaacttcctaatcca

SEQ ID NO: 50546 - DNA, 50 bp, synthetic construct
  source 1..50: mol_type = other DNA
atttcaccatattaatcaaactaatctcgaactcctaacttcctaatccg

SEQ ID NO: 50547 - DNA, 50 bp, synthetic construct
  source 1..50: mol_type = other DNA
atatacaccaaaacaaaaaaattttaccactcactacctatataacctca

SEQ ID NO: 50548 - DNA, 50 bp, synthetic construct
  source 1..50: mol_type = other DNA
atatacgccaaaacgaaaaaattttaccactcactacctatataacctcg

SEQ ID NO: 50549 - DNA, 50 bp, synthetic construct
  source 1..50: mol_type = other DNA
aataaacaacaacaaaccaacaattaatatatcccaaatataaaaaaaca

SEQ ID NO: 50550 - DNA, 50 bp, synthetic construct
  source 1..50: mol_type = other DNA
aataaacgacgacaaaccgacgattaatatatcccgaatataaaaaaacg

SEQ ID NO: 50551 - DNA, 50 bp, synthetic construct
  source 1..50: mol_type = other DNA
ctaaacaaaaaatacactataaactcaaaaaaataaacaacaacaaacca

SEQ ID NO: 50552 - DNA, 50 bp, synthetic construct
  source 1..50: mol_type = other DNA
ctaaacgaaaaatacactataaactcgaaaaaataaacgacgacaaaccg

SEQ ID NO: 50553 - DNA, 50 bp, synthetic construct
  source 1..50: mol_type = other DNA
aaaaaaacaaaaaacttatctaaattctcactacttccttacaactaaca

SEQ ID NO: 50554 - DNA, 50 bp, synthetic construct
  source 1..50: mol_type = other DNA
aaaaaaacgaaaaacttatctaaattctcactacttccttacaactaacg

SEQ ID NO: 50555 - DNA, 50 bp, synthetic construct
  source 1..50: mol_type = other DNA
atacttaaaaaaccaacaacctaaaaaacataaatcacctaaaccacaca

SEQ ID NO: 50556 - DNA, 50 bp, synthetic construct
  source 1..50: mol_type = other DNA
atacttaaaaaaccgacgacctaaaaaacataaatcgcctaaaccacgcg

SEQ ID NO: 50557 - DNA, 50 bp, synthetic construct
  source 1..50: mol_type = other DNA
aaaaaacaacaacaacaacaaaaacctaaatcaaataaaaacaaaccaca

SEQ ID NO: 50558 - DNA, 50 bp, synthetic construct
  source 1..50: mol_type = other DNA
aaaaaacaacgacaacgacgaaaacctaaatcaaataaaaacaaaccgcg

SEQ ID NO: 50559 - DNA, 50 bp, synthetic construct
  source 1..50: mol_type = other DNA
aacaacaaaaacctaaatcaaataaaaacaaaccacaaaaacacaaacca

SEQ ID NO: 50560 - DNA, 50 bp, synthetic construct
  source 1..50: mol_type = other DNA
aacgacgaaaacctaaatcaaataaaaacaaaccgcgaaaacgcgaaccg

SEQ ID NO: 50561 - DNA, 50 bp, synthetic construct
  source 1..50: mol_type = other DNA
aataaaaacaaaccacaaaaacacaaaccaacaaaaccaaaaaactatca

SEQ ID NO: 50562 - DNA, 50 bp, synthetic construct
  source 1..50: mol_type = other DNA
aataaaaacaaaccgcgaaaacgcgaaccgacgaaaccaaaaaactatcg

SEQ ID NO: 50563 - DNA, 50 bp, synthetic construct
  source 1..50: mol_type = other DNA
aaacacaaaacaaactaaacactctaataaaaaaactccaaacccaacca

SEQ ID NO: 50564 - DNA, 50 bp, synthetic construct
  source 1..50: mol_type = other DNA
aaacacgaaacgaactaaacgctctaataaaaaaactccaaacccgaccg

SEQ ID NO: 50565 - DNA, 50 bp, synthetic construct
  source 1..50: mol_type = other DNA
actacaacccctttcccatcttcctaaaatatacaaaaccttaaaaacca

SEQ ID NO: 50566 - DNA, 50 bp, synthetic construct
  source 1..50: mol_type = other DNA
actacaacccctttcccgtcttcctaaaatatacgaaaccttaaaaaccg

SEQ ID NO: 50567 - DNA, 50 bp, synthetic construct
  source 1..50: mol_type = other DNA
aaaatatacaaaaccttaaaaaccaacccaaacctaaaaacaaaacccca

SEQ ID NO: 50568 - DNA, 50 bp, synthetic construct
  source 1..50: mol_type = other DNA
aaaatatacgaaaccttaaaaaccgacccgaacctaaaaacgaaaccccg

SEQ ID NO: 50569 - DNA, 50 bp, synthetic construct
  source 1..50: mol_type = other DNA
caaacctaaaaacaaaaccccaaaaacttaacaccttaaacaaaaaaaca

SEQ ID NO: 50570 - DNA, 50 bp, synthetic construct
  source 1..50: mol_type = other DNA
cgaacctaaaaacgaaaccccgaaaacttaacgccttaaacgaaaaaacg

SEQ ID NO: 50571 - DNA, 50 bp, synthetic construct
  source 1..50: mol_type = other DNA
caaaaccccaaaaacttaacaccttaaacaaaaaaacaaaacaaaaacca

SEQ ID NO: 50572 - DNA, 50 bp, synthetic construct
  source 1..50: mol_type = other DNA
cgaaaccccgaaaacttaacgccttaaacgaaaaaacgaaacaaaaaccg

SEQ ID NO: 50573 - DNA, 50 bp, synthetic construct
  source 1..50: mol_type = other DNA
ccccaaaaacttaacaccttaaacaaaaaaacaaaacaaaaaccaaacca

SEQ ID NO: 50574 - DNA, 50 bp, synthetic construct
  source 1..50: mol_type = other DNA
ccccgaaaacttaacgccttaaacgaaaaaacgaaacaaaaaccgaaccg

SEQ ID NO: 50575 - DNA, 50 bp, synthetic construct
  source 1..50: mol_type = other DNA
ttaacaccttaaacaaaaaaacaaaacaaaaaccaaaccattaaacctca

SEQ ID NO: 50576 - DNA, 50 bp, synthetic construct
  source 1..50: mol_type = other DNA
ttaacgccttaaacgaaaaaacgaaacaaaaaccgaaccgttaaacctcg

SEQ ID NO: 50577 - DNA, 50 bp, synthetic construct
  source 1..50: mol_type = other DNA
ccttaaacaaaaaaacaaaacaaaaaccaaaccattaaacctcaaactca

SEQ ID NO: 50578 - DNA, 50 bp, synthetic construct
  source 1..50: mol_type = other DNA
ccttaaacgaaaaaacgaaacaaaaaccgaaccgttaaacctcgaactcg

SEQ ID NO: 50579 - DNA, 50 bp, synthetic construct
  source 1..50: mol_type = other DNA
aaaaaacaaaacaaaaaccaaaccattaaacctcaaactcaaaaataaca

SEQ ID NO: 50580 - DNA, 50 bp, synthetic construct
  source 1..50: mol_type = other DNA
aaaaaacgaaacaaaaaccgaaccgttaaacctcgaactcgaaaataacg

SEQ ID NO: 50581 - DNA, 50 bp, synthetic construct
  source 1..50: mol_type = other DNA
acaaaaaccaaaccattaaacctcaaactcaaaaataacaaaaaaaacca

SEQ ID NO: 50582 - DNA, 50 bp, synthetic construct
  source 1..50: mol_type = other DNA
acaaaaaccgaaccgttaaacctcgaactcgaaaataacgaaaaaaaccg

SEQ ID NO: 50583 - DNA, 50 bp, synthetic construct
  source 1..50: mol_type = other DNA
aatacaaaaatacacatcaaacaattaaaaacaaaaaccaaaaaaatcca

SEQ ID NO: 50584 - DNA, 50 bp, synthetic construct
  source 1..50: mol_type = other DNA
aatacaaaaatacgcgtcgaacaattaaaaacgaaaaccaaaaaaatccg

SEQ ID NO: 50585 - DNA, 50 bp, synthetic construct
  source 1..50: mol_type = other DNA
ctcctaaaaacatttacaaatatccttcctctatccacatcccttatcca

SEQ ID NO: 50586 - DNA, 50 bp, synthetic construct
  source 1..50: mol_type = other DNA
ctcctaaaaacatttacgaatatccttcctctatccacatcccttatccg

SEQ ID NO: 50587 - DNA, 50 bp, synthetic construct
  source 1..50: mol_type = other DNA
acttcttcaaaaaaccaaaaaccttcaactctactcaaaaactcaaacca

SEQ ID NO: 50588 - DNA, 50 bp, synthetic construct
  source 1..50: mol_type = other DNA
acttcttcgaaaaaccgaaaaccttcaactctactcaaaaactcgaaccg

SEQ ID NO: 50589 - DNA, 50 bp, synthetic construct
  source 1..50: mol_type = other DNA
tcaaattcctttacatattcatccctcccaaacaaaaacttcaaatctca

SEQ ID NO: 50590 - DNA, 50 bp, synthetic construct
  source 1..50: mol_type = other DNA
tcgaattcctttacgtattcatccctcccgaacaaaaacttcaaatctcg

SEQ ID NO: 50591 - DNA, 50 bp, synthetic construct
  source 1..50: mol_type = other DNA
caaaaaaaaaccccaaaacttaaaacccttacccaaaaaaaataaacaca

SEQ ID NO: 50592 - DNA, 50 bp, synthetic construct
  source 1..50: mol_type = other DNA
cgaaaaaaaaccccgaaacttaaaacccttacccgaaaaaaataaacacg

SEQ ID NO: 50593 - DNA, 50 bp, synthetic construct
  source 1..50: mol_type = other DNA
ccaaaacttaaaacccttacccaaaaaaaataaacacacaaaaaaaccca

SEQ ID NO: 50594 - DNA, 50 bp, synthetic construct
  source 1..50: mol_type = other DNA
ccgaaacttaaaacccttacccgaaaaaaataaacacgcaaaaaaacccg

SEQ ID NO: 50595 - DNA, 50 bp, synthetic construct
  source 1..50: mol_type = other DNA
ttaaaacccttacccaaaaaaaataaacacacaaaaaaacccaaaaaaca

SEQ ID NO: 50596 - DNA, 50 bp, synthetic construct
  source 1..50: mol_type = other DNA
ttaaaacccttacccgaaaaaaataaacacgcaaaaaaacccgaaaaacg

SEQ ID NO: 50597 - DNA, 50 bp, synthetic construct
  source 1..50: mol_type = other DNA
aacccaaaaaacaaaataaaaaaccaaaaataaaaccaacttctcctaca

SEQ ID NO: 50598 - DNA, 50 bp, synthetic construct
  source 1..50: mol_type = other DNA
aacccgaaaaacgaaataaaaaaccaaaaataaaaccaacttctcctacg

SEQ ID NO: 50599 - DNA, 50 bp, synthetic construct
  source 1..50: mol_type = other DNA
tataaagttatagttagaagaataagttttggtgttttattatatagtat

SEQ ID NO: 50600 - DNA, 50 bp, synthetic construct
  source 1..50: mol_type = other DNA
tataaagttatagttagaagaataagttttggtgttttattatatagtac

SEQ ID NO: 50601 - DNA, 50 bp, synthetic construct
  source 1..50: mol_type = other DNA
ttttgtattgtgatgtatagtatttagtaaattaatggtgaaatataaat

SEQ ID NO: 50602 - DNA, 50 bp, synthetic construct
  source 1..50: mol_type = other DNA
ttttgtattgtgatgtatagtatttagtaaattaacggcgaaatataaac

SEQ ID NO: 50603 - DNA, 50 bp, synthetic construct
  source 1..50: mol_type = other DNA
atttggaaaagtttaatgtattttttaataatattaaggatagtttgaat

SEQ ID NO: 50604 - DNA, 50 bp, synthetic construct
  source 1..50: mol_type = other DNA
atttggaaaagtttaatgtattttttaataatattaaggatagtttgaac

SEQ ID NO: 50605 - DNA, 50 bp, synthetic construct
  source 1..50: mol_type = other DNA
aaaaatataaccaaaacacaataaaaaactctcacaattaataaaaaaca

SEQ ID NO: 50606 - DNA, 50 bp, synthetic construct
  source 1..50: mol_type = other DNA
aaaaatataaccaaaacgcaataaaaaactctcgcgattaataaaaaacg

SEQ ID NO: 50607 - DNA, 50 bp, synthetic construct
  source 1..50: mol_type = other DNA
acaacctcctcttaataaactcaaaaaacaaaaaactttccctaaaccca

SEQ ID NO: 50608 - DNA, 50 bp, synthetic construct
  source 1..50: mol_type = other DNA
acaacctcctcttaataaactcaaaaaacgaaaaactttccctaaacccg

SEQ ID NO: 50609 - DNA, 50 bp, synthetic construct
  source 1..50: mol_type = other DNA
tcaatacataaaatataccaaaaccactacaaaacaaacacataacccca

SEQ ID NO: 50610 - DNA, 50 bp, synthetic construct
  source 1..50: mol_type = other DNA
tcaatacataaaatataccaaaaccgctacgaaacaaacacgtaaccccg

SEQ ID NO: 50611 - DNA, 50 bp, synthetic construct
  source 1..50: mol_type = other DNA
acaaaatataaaataaactcacaacaaaaaaaaccaactaacttactaca

SEQ ID NO: 50612 - DNA, 50 bp, synthetic construct
  source 1..50: mol_type = other DNA
acaaaatataaaataaactcacgacgaaaaaaaccaactaacttactacg

SEQ ID NO: 50613 - DNA, 50 bp, synthetic construct
  source 1..50: mol_type = other DNA
ctaaaaactcaaaaatattccctatctacaaaaaattccatccaacaaca

SEQ ID NO: 50614 - DNA, 50 bp, synthetic construct
  source 1..50: mol_type = other DNA
ctaaaaactcaaaaatattccctatctacaaaaaattccgtccgacgacg

SEQ ID NO: 50615 - DNA, 50 bp, synthetic construct
  source 1..50: mol_type = other DNA
caactaaaaactcaaaaatattccctatctacaaaaaattccatccaaca

SEQ ID NO: 50616 - DNA, 50 bp, synthetic construct
  source 1..50: mol_type = other DNA
cgactaaaaactcaaaaatattccctatctacaaaaaattccgtccgacg

SEQ ID NO: 50617 - DNA, 50 bp, synthetic construct
  source 1..50: mol_type = other DNA
acaactcaataaacaactaacccatcctttatcaccatttttatccaaca

SEQ ID NO: 50618 - DNA, 50 bp, synthetic construct
  source 1..50: mol_type = other DNA
acgactcaataaacaactaacccatcctttatcaccgtttttatccaacg

SEQ ID NO: 50619 - DNA, 50 bp, synthetic construct
  source 1..50: mol_type = other DNA
atcctaaataaaaaacttcatctacattcattccccaaccctccctacca

SEQ ID NO: 50620 - DNA, 50 bp, synthetic construct
  source 1..50: mol_type = other DNA
atcctaaataaaaaacttcatctacattcattccccgaccctccctaccg

SEQ ID NO: 50621 - DNA, 50 bp, synthetic construct
  source 1..50: mol_type = other DNA
tataataaccccacacacaacttcctttaaaatctatcccctactctcca

SEQ ID NO: 50622 - DNA, 50 bp, synthetic construct
  source 1..50: mol_type = other DNA
tataataaccccacacacaacttcctttaaaatctatcccctactctccg

SEQ ID NO: 50623 - DNA, 50 bp, synthetic construct
  source 1..50: mol_type = other DNA
ctccttaactaaattcacaaaaccccatctacacaacttaacttctatca

SEQ ID NO: 50624 - DNA, 50 bp, synthetic construct
  source 1..50: mol_type = other DNA
ctccttaactaaattcacaaaaccccgtctacacgacttaacttctatcg

SEQ ID NO: 50625 - DNA, 50 bp, synthetic construct
  source 1..50: mol_type = other DNA
cactaacatcactaaaaaaccaacaaaacataaaaaacacacaaatatca

SEQ ID NO: 50626 - DNA, 50 bp, synthetic construct
  source 1..50: mol_type = other DNA
cactaacatcactaaaaaaccgacgaaacgtaaaaaacacgcgaatatcg

SEQ ID NO: 50627 - DNA, 50 bp, synthetic construct
  source 1..50: mol_type = other DNA
cataacccactaacatcactaaaaaaccaacaaaacataaaaaacacaca

SEQ ID NO: 50628 - DNA, 50 bp, synthetic construct
  source 1..50: mol_type = other DNA
cataacccactaacatcactaaaaaaccgacgaaacgtaaaaaacacgcg

SEQ ID NO: 50629 - DNA, 50 bp, synthetic construct
  source 1..50: mol_type = other DNA
cccataacccactaacatcactaaaaaaccaacaaaacataaaaaacaca

SEQ ID NO: 50630 - DNA, 50 bp, synthetic construct
  source 1..50: mol_type = other DNA
cccataacccactaacatcactaaaaaaccgacgaaacgtaaaaaacacg

SEQ ID NO: 50631 - DNA, 50 bp, synthetic construct
  source 1..50: mol_type = other DNA
cctacttcctataaaacccataacccactaacatcactaaaaaaccaaca

SEQ ID NO: 50632 - DNA, 50 bp, synthetic construct
  source 1..50: mol_type = other DNA
cctacttcctataaaacccataacccactaacatcactaaaaaaccgacg

SEQ ID NO: 50633 - DNA, 50 bp, synthetic construct
  source 1..50: mol_type = other DNA
ccccacaaaaaacaaaaactaccatcaacctaataaaacataccaaccca

SEQ ID NO: 50634 - DNA, 50 bp, synthetic construct
  source 1..50: mol_type = other DNA
ccccacaaaaaacaaaaactaccatcaacctaataaaacgtaccaacccg

SEQ ID NO: 50635 - DNA, 50 bp, synthetic construct
  source 1..50: mol_type = other DNA
tatagatatagagaggtagaataagtaataatgagtatttgtatttgtat

SEQ ID NO: 50636 - DNA, 50 bp, synthetic construct
  source 1..50: mol_type = other DNA
tatagatatagagaggtagaataagtaataatgagtatttgtatttgtac

SEQ ID NO: 50637 - DNA, 50 bp, synthetic construct
  source 1..50: mol_type = other DNA
atacttactcaacacatcaatcattattaaaacaacatccacacacccca

SEQ ID NO: 50638 - DNA, 50 bp, synthetic construct
  source 1..50: mol_type = other DNA
atacttactcaacacgtcaatcattattaaaacaacgtccacacaccccg

SEQ ID NO: 50639 - DNA, 50 bp, synthetic construct
  source 1..50: mol_type = other DNA
acttcttaacctttacaaaaaaacaaaaaacctatttcctacaaccccca

SEQ ID NO: 50640 - DNA, 50 bp, synthetic construct
  source 1..50: mol_type = other DNA
acttcttaacctttacaaaaaaacgaaaaacctatttcctacaacccccg

SEQ ID NO: 50641 - DNA, 50 bp, synthetic construct
  source 1..50: mol_type = other DNA
aaaaataaaaaacaacttactaaccaaccccactaaatcaccctccaaca

SEQ ID NO: 50642 - DNA, 50 bp, synthetic construct
  source 1..50: mol_type = other DNA
aaaaataaaaaacaacttactaaccaaccccgctaaatcaccctccgacg

SEQ ID NO: 50643 - DNA, 50 bp, synthetic construct
  source 1..50: mol_type = other DNA
tctcttctcctcatttcctattaaactataacacaaactaactaccaaca

SEQ ID NO: 50644 - DNA, 50 bp, synthetic construct
  source 1..50: mol_type = other DNA
tctcttctcctcgtttcctattaaactataacgcaaactaactaccaacg

SEQ ID NO: 50645 - DNA, 50 bp, synthetic construct
  source 1..50: mol_type = other DNA
ccacatatcaattacactccattctaaataaacaactcccaaaaacccca

SEQ ID NO: 50646 - DNA, 50 bp, synthetic construct
  source 1..50: mol_type = other DNA
ccacatatcaattacactccgttctaaataaacaactcccaaaaaccccg

SEQ ID NO: 50647 - DNA, 50 bp, synthetic construct
  source 1..50: mol_type = other DNA
aacatataaacaaaaaccacaacactaaaataatttattaccaccactca

SEQ ID NO: 50648 - DNA, 50 bp, synthetic construct
  source 1..50: mol_type = other DNA
aacatataaacaaaaaccgcgacactaaaataatttattaccgccgctcg

SEQ ID NO: 50649 - DNA, 50 bp, synthetic construct
  source 1..50: mol_type = other DNA
ctctatccttaaaaaactaacatttataaaataaaaataaaccttaaaca

SEQ ID NO: 50650 - DNA, 50 bp, synthetic construct
  source 1..50: mol_type = other DNA
ctctatccttaaaaaactaacatttataaaataaaaataaaccttaaacg

SEQ ID NO: 50651 - DNA, 50 bp, synthetic construct
  source 1..50: mol_type = other DNA
ataaaacaaaacaaacacactcaaaataaaaacaacaacaataaaaccca

SEQ ID NO: 50652 - DNA, 50 bp, synthetic construct
  source 1..50: mol_type = other DNA
ataaaacaaaacaaacacactcaaaataaaaacaacaacaataaaacccg

SEQ ID NO: 50653 - DNA, 50 bp, synthetic construct
  source 1..50: mol_type = other DNA
aaaattaccttaattttcactcaaaaccataatttaaaaaaataatacca

SEQ ID NO: 50654 - DNA, 50 bp, synthetic construct
  source 1..50: mol_type = other DNA
aaaattaccttaattttcactcaaaaccgtaatttaaaaaaataataccg

SEQ ID NO: 50655 - DNA, 50 bp, synthetic construct
  source 1..50: mol_type = other DNA
atataaaaaatattaacatttattaaatctaataaaataccacttaccca

SEQ ID NO: 50656 - DNA, 50 bp, synthetic construct
  source 1..50: mol_type = other DNA
atataaaaaatattaacgtttattaaatctaataaaataccacttacccg

SEQ ID NO: 50657 - DNA, 50 bp, synthetic construct
  source 1..50: mol_type = other DNA
taaaacatttaaattacaaacaaataatattctaccaaatttaataaaca

SEQ ID NO: 50658 - DNA, 50 bp, synthetic construct
  source 1..50: mol_type = other DNA
taaaacatttaaattacgaacaaataatattctaccaaatttaataaacg

SEQ ID NO: 50659 - DNA, 50 bp, synthetic construct
  source 1..50: mol_type = other DNA
ttctctaaatctttaaaaactttaaaatttattttaataaaacaaaacca

SEQ ID NO: 50660 - DNA, 50 bp, synthetic construct
  source 1..50: mol_type = other DNA
ttctctaaatctttaaaaactttaaaatttattttaataaaacaaaaccg

SEQ ID NO: 50661 - DNA, 50 bp, synthetic construct
  source 1..50: mol_type = other DNA
taaaaactttaaaatttattttaataaaacaaaaccaccaattatcatca

SEQ ID NO: 50662 - DNA, 50 bp, synthetic construct
  source 1..50: mol_type = other DNA
taaaaactttaaaatttattttaataaaacaaaaccgccaattatcatcg

SEQ ID NO: 50663 - DNA, 50 bp, synthetic construct
  source 1..50: mol_type = other DNA
caacaataaataacataaaaaaaccccttccaataaaacacctacaacca

SEQ ID NO: 50664 - DNA, 50 bp, synthetic construct
  source 1..50: mol_type = other DNA
cgacaataaataacataaaaaaaccccttccgataaaacacctacaaccg

SEQ ID NO: 50665 - DNA, 50 bp, synthetic construct
  source 1..50: mol_type = other DNA
tctaaccatcaccacaaacaacaataaataacataaaaaaaccccttcca

SEQ ID NO: 50666 - DNA, 50 bp, synthetic construct
  source 1..50: mol_type = other DNA
tctaaccatcgccacaaacgacaataaataacataaaaaaaccccttccg

SEQ ID NO: 50667 - DNA, 50 bp, synthetic construct
  source 1..50: mol_type = other DNA
actctaaaaattcaaaaaataaaacaataaaattccaaactaaccaaaca

SEQ ID NO: 50668 - DNA, 50 bp, synthetic construct
  source 1..50: mol_type = other DNA
actctaaaaattcgaaaaataaaacgataaaattccaaactaaccaaacg

SEQ ID NO: 50669 - DNA, 50 bp, synthetic construct
  source 1..50: mol_type = other DNA
atccttccaccttaaatacctaaaaaattcccaataactcacccaacaca

SEQ ID NO: 50670 - DNA, 50 bp, synthetic construct
  source 1..50: mol_type = other DNA
atccttccgccttaaatacctaaaaaattcccgataactcacccaacacg

SEQ ID NO: 50671 - DNA, 50 bp, synthetic construct
  source 1..50: mol_type = other DNA
aacataactaacataactcaacctcacctcaaaaaccaaaacacaaacca

SEQ ID NO: 50672 - DNA, 50 bp, synthetic construct
  source 1..50: mol_type = other DNA
aacgtaactaacgtaactcaacctcacctcaaaaaccaaaacacaaaccg

SEQ ID NO: 50673 - DNA, 50 bp, synthetic construct
  source 1..50: mol_type = other DNA
atttatagagttagagaataattggtgaggattaaatgaggttaatgatt

SEQ ID NO: 50674 - DNA, 50 bp, synthetic construct
  source 1..50: mol_type = other DNA
atttatagagttagagaataattggtgaggattaaatgaggttaacgatc

SEQ ID NO: 50675 - DNA, 50 bp, synthetic construct
  source 1..50: mol_type = other DNA
ctaatttcccactctactcaacccaaaccacaaatttttacaaaaatcca

SEQ ID NO: 50676 - DNA, 50 bp, synthetic construct
  source 1..50: mol_type = other DNA
ctaatttcccgctctactcaacccaaaccacaaatttttacgaaaatccg

SEQ ID NO: 50677 - DNA, 50 bp, synthetic construct
  source 1..50: mol_type = other DNA
aaacaaaacaaaaaatcaatctcactttacacaaaaaaccaaaaaaaaca

SEQ ID NO: 50678 - DNA, 50 bp, synthetic construct
  source 1..50: mol_type = other DNA
aaacaaaacgaaaaatcaatctcactttacacaaaaaaccgaaaaaaacg

SEQ ID NO: 50679 - DNA, 50 bp, synthetic construct
  source 1..50: mol_type = other DNA
aatcaatctcactttacacaaaaaaccaaaaaaaacaccaaaaaaaacca

SEQ ID NO: 50680 - DNA, 50 bp, synthetic construct
  source 1..50: mol_type = other DNA
aatcaatctcactttacacaaaaaaccgaaaaaaacgccgaaaaaaaccg

SEQ ID NO: 50681 - DNA, 50 bp, synthetic construct
  source 1..50: mol_type = other DNA
caaaacccactacaaaaacaaaacccaaaaaaaccataatactaaatcca

SEQ ID NO: 50682 - DNA, 50 bp, synthetic construct
  source 1..50: mol_type = other DNA
caaaacccgctacgaaaacaaaacccaaaaaaaccgtaatactaaatccg

SEQ ID NO: 50683 - DNA, 50 bp, synthetic construct
  source 1..50: mol_type = other DNA
aacccactacaaaaacaaaacccaaaaaaaccataatactaaatccatca

SEQ ID NO: 50684 - DNA, 50 bp, synthetic construct
  source 1..50: mol_type = other DNA
aacccgctacgaaaacaaaacccaaaaaaaccgtaatactaaatccgtcg

SEQ ID NO: 50685 - DNA, 50 bp, synthetic construct
  source 1..50: mol_type = other DNA
aactataactactaacataccctatacattaatcaccaactactcctcca

SEQ ID NO: 50686 - DNA, 50 bp, synthetic construct
  source 1..50: mol_type = other DNA
aactataactactaacgtaccctatacgttaatcaccaactactcctccg

SEQ ID NO: 50687 - DNA, 50 bp, synthetic construct
  source 1..50: mol_type = other DNA
ataaataaacatcaataaatcaacacacaaaacctcactcaaaaataaca

SEQ ID NO: 50688 - DNA, 50 bp, synthetic construct
  source 1..50: mol_type = other DNA
ataaataaacgtcgataaatcgacgcgcgaaacctcgctcgaaaataacg

SEQ ID NO: 50689 - DNA, 50 bp, synthetic construct
  source 1..50: mol_type = other DNA
aaaatctaaaaacaacacaccaaataaataaacatcaataaatcaacaca

SEQ ID NO: 50690 - DNA, 50 bp, synthetic construct
  source 1..50: mol_type = other DNA
aaaatctaaaaacgacgcaccaaataaataaacgtcgataaatcgacgcg

SEQ ID NO: 50691 - DNA, 50 bp, synthetic construct
  source 1..50: mol_type = other DNA
aaaaaatctaaaaacaacacaccaaataaataaacatcaataaatcaaca

SEQ ID NO: 50692 - DNA, 50 bp, synthetic construct
  source 1..50: mol_type = other DNA
aaaaaatctaaaaacgacgcaccaaataaataaacgtcgataaatcgacg

SEQ ID NO: 50693 - DNA, 50 bp, synthetic construct
  source 1..50: mol_type = other DNA
taaaaaaaatctaaaaacaacacaccaaataaataaacatcaataaatca

SEQ ID NO: 50694 - DNA, 50 bp, synthetic construct
  source 1..50: mol_type = other DNA
taaaaaaaatctaaaaacgacgcaccaaataaataaacgtcgataaatcg

SEQ ID NO: 50695 - DNA, 50 bp, synthetic construct
  source 1..50: mol_type = other DNA
ctctcacaaattaaaaaaaatctaaaaacaacacaccaaataaataaaca

SEQ ID NO: 50696 - DNA, 50 bp, synthetic construct
  source 1..50: mol_type = other DNA
ctctcgcgaattaaaaaaaatctaaaaacgacgcaccaaataaataaacg

SEQ ID NO: 50697 - DNA, 50 bp, synthetic construct
  source 1..50: mol_type = other DNA
taaacatttttaaaaacctctcacaaattaaaaaaaatctaaaaacaaca

SEQ ID NO: 50698 - DNA, 50 bp, synthetic construct
  source 1..50: mol_type = other DNA
taaacatttttaaaaacctctcgcgaattaaaaaaaatctaaaaacgacg

SEQ ID NO: 50699 - DNA, 50 bp, synthetic construct
  source 1..50: mol_type = other DNA
aaaacatctctttaacaactaaaaaaaataacaataaacaaaacctttca

SEQ ID NO: 50700 - DNA, 50 bp, synthetic construct
  source 1..50: mol_type = other DNA
aaaacatctctttaacgactaaaaaaaataacaataaacaaaacctttcg

SEQ ID NO: 50701 - DNA, 50 bp, synthetic construct
  source 1..50: mol_type = other DNA
aaaatcacaacaaataaacataaactccaaaaaaacaactcaacaaaaca

SEQ ID NO: 50702 - DNA, 50 bp, synthetic construct
  source 1..50: mol_type = other DNA
aaaatcgcgacgaataaacgtaaactccaaaaaaacgactcgacgaaacg

SEQ ID NO: 50703 - DNA, 50 bp, synthetic construct
  source 1..50: mol_type = other DNA
acacaacaaacaacaacactctaaactataataataaaataaaaacatca

SEQ ID NO: 50704 - DNA, 50 bp, synthetic construct
  source 1..50: mol_type = other DNA
acgcgacaaacaacaacactctaaactataataataaaataaaaacatcg

SEQ ID NO: 50705 - DNA, 50 bp, synthetic construct
  source 1..50: mol_type = other DNA
tgggtattgagttattatttagagggaaattatggttttaagaatttaat

SEQ ID NO: 50706 - DNA, 50 bp, synthetic construct
  source 1..50: mol_type = other DNA
tgggtattgagttattatttagagggaaattacggttttaagaatttaac

SEQ ID NO: 50707 - DNA, 50 bp, synthetic construct
  source 1..50: mol_type = other DNA
attaaataaaaataatactttccacactcatactataaaaactaaactca

SEQ ID NO: 50708 - DNA, 50 bp, synthetic construct
  source 1..50: mol_type = other DNA
attaaataaaaataatactttccacactcatactataaaaactaaactcg

SEQ ID NO: 50709 - DNA, 50 bp, synthetic construct
  source 1..50: mol_type = other DNA
caccaaaatttataccacaacttatacccattcatttctatcccctccca

SEQ ID NO: 50710 - DNA, 50 bp, synthetic construct
  source 1..50: mol_type = other DNA
caccaaaatttataccacaacttatacccattcatttctatcccctcccg

SEQ ID NO: 50711 - DNA, 50 bp, synthetic construct
  source 1..50: mol_type = other DNA
aaattaaaataactacttttaacaaacaaactaacataaaataaaaaaca

SEQ ID NO: 50712 - DNA, 50 bp, synthetic construct
  source 1..50: mol_type = other DNA
aaattaaaataactacttttaacgaacaaactaacgtaaaataaaaaacg

SEQ ID NO: 50713 - DNA, 50 bp, synthetic construct
  source 1..50: mol_type = other DNA
acttcaacttcctaaaataccaaaattacaaacataaactactacaccca

SEQ ID NO: 50714 - DNA, 50 bp, synthetic construct
  source 1..50: mol_type = other DNA
acttcgacttcctaaaataccgaaattacaaacgtaaactactacgcccg

SEQ ID NO: 50715 - DNA, 50 bp, synthetic construct
  source 1..50: mol_type = other DNA
tatttagaaatggttaagatggtaaattttggttaggtatagtggtttat

SEQ ID NO: 50716 - DNA, 50 bp, synthetic construct
  source 1..50: mol_type = other DNA
tatttagaaatggttaagatggtaaattttggttaggtatagtggtttac

SEQ ID NO: 50717 - DNA, 50 bp, synthetic construct
  source 1..50: mol_type = other DNA
aaaattaaataccattaattaaattcacattattataaaaaaactctcca

SEQ ID NO: 50718 - DNA, 50 bp, synthetic construct
  source 1..50: mol_type = other DNA
aaaattaaataccgttaattaaattcgcattattataaaaaaactctccg

SEQ ID NO: 50719 - DNA, 50 bp, synthetic construct
  source 1..50: mol_type = other DNA
taagtgtttattgataaatggataaagaaaatgaggtatatatatataat

SEQ ID NO: 50720 - DNA, 50 bp, synthetic construct
  source 1..50: mol_type = other DNA
taagtgtttattgataaatggataaagaaaatgaggtatatatatataac

SEQ ID NO: 50721 - DNA, 50 bp, synthetic construct
  source 1..50: mol_type = other DNA
caaatctatcttctaaaacatatactaaatactaaaataaattaaaaaca

SEQ ID NO: 50722 - DNA, 50 bp, synthetic construct
  source 1..50: mol_type = other DNA
caaatctatcttctaaaacatatactaaatactaaaataaattaaaaacg

SEQ ID NO: 50723 - DNA, 50 bp, synthetic construct
  source 1..50: mol_type = other DNA
cctattatcctcttccataccctaacccaacaacataactaaaaaaaaca

SEQ ID NO: 50724 - DNA, 50 bp, synthetic construct
  source 1..50: mol_type = other DNA
cctattatcctcttccataccctaacccaacaacataactaaaaaaaacg

SEQ ID NO: 50725 - DNA, 50 bp, synthetic construct
  source 1..50: mol_type = other DNA
caaaactataaaaacacaaataaaactccaacttcaacaaccaacaacca

SEQ ID NO: 50726 - DNA, 50 bp, synthetic construct
  source 1..50: mol_type = other DNA
caaaactataaaaacacaaataaaactccgacttcgacaaccaacgaccg

SEQ ID NO: 50727 - DNA, 50 bp, synthetic construct
  source 1..50: mol_type = other DNA
aacccaaccaaaattcataacaaaactataaaaacacaaataaaactcca

SEQ ID NO: 50728 - DNA, 50 bp, synthetic construct
  source 1..50: mol_type = other DNA
aacccgaccgaaattcgtaacaaaactataaaaacacaaataaaactccg

SEQ ID NO: 50729 - DNA, 50 bp, synthetic construct
  source 1..50: mol_type = other DNA
cctatcacaaatcccaatcaaattctaaaaaacacaacctcaaaattaca

SEQ ID NO: 50730 - DNA, 50 bp, synthetic construct
  source 1..50: mol_type = other DNA
cctatcacgaatcccgatcgaattctaaaaaacacaacctcgaaattacg

SEQ ID NO: 50731 - DNA, 50 bp, synthetic construct
  source 1..50: mol_type = other DNA
atcaaattctaaaaaacacaacctcaaaattacaaaccaaatacaactca

SEQ ID NO: 50732 - DNA, 50 bp, synthetic construct
  source 1..50: mol_type = other DNA
atcgaattctaaaaaacacaacctcgaaattacgaaccgaatacgactcg

SEQ ID NO: 50733 - DNA, 50 bp, synthetic construct
  source 1..50: mol_type = other DNA
aaattctaaaaaacacaacctcaaaattacaaaccaaatacaactcaaca

SEQ ID NO: 50734 - DNA, 50 bp, synthetic construct
  source 1..50: mol_type = other DNA
gaattctaaaaaacacaacctcgaaattacgaaccgaatacgactcgacg

SEQ ID NO: 50735 - DNA, 50 bp, synthetic construct
  source 1..50: mol_type = other DNA
ccaaatcttactaaactataaaaaaaataactataatctctataccatca

SEQ ID NO: 50736 - DNA, 50 bp, synthetic construct
  source 1..50: mol_type = other DNA
ccgaatcttactaaactataaaaaaaataactataatctctataccgtcg

SEQ ID NO: 50737 - DNA, 50 bp, synthetic construct
  source 1..50: mol_type = other DNA
aaatttcaactaatctataaccctctaaccaccacaccccaattaaaaca

SEQ ID NO: 50738 - DNA, 50 bp, synthetic construct
  source 1..50: mol_type = other DNA
aaatttcaactaatctataaccctctaaccgccgcaccccgattaaaacg

SEQ ID NO: 50739 - DNA, 50 bp, synthetic construct
  source 1..50: mol_type = other DNA
taataaaaacataactacacacataaaaccaaaccccattcttcttctca

SEQ ID NO: 50740 - DNA, 50 bp, synthetic construct
  source 1..50: mol_type = other DNA
taataaaaacataactacacgcgtaaaaccgaaccccgttcttcttctcg

SEQ ID NO: 50741 - DNA, 50 bp, synthetic construct
  source 1..50: mol_type = other DNA
atacattcaccaaatttattaataaaaacataactacacacataaaacca

SEQ ID NO: 50742 - DNA, 50 bp, synthetic construct
  source 1..50: mol_type = other DNA
atacgttcaccgaatttattaataaaaacataactacacgcgtaaaaccg

SEQ ID NO: 50743 - DNA, 50 bp, synthetic construct
  source 1..50: mol_type = other DNA
aaaaaaaaaacatcttaaccacaattataaaaaccctatttcccaaccca

SEQ ID NO: 50744 - DNA, 50 bp, synthetic construct
  source 1..50: mol_type = other DNA
aaaaaaaaaacgtcttaaccacgattataaaaaccctatttcccaacccg

SEQ ID NO: 50745 - DNA, 50 bp, synthetic construct
  source 1..50: mol_type = other DNA
aataactactaccaaatctaaaaaaactaaaaccaaattaccaaactaca

SEQ ID NO: 50746 - DNA, 50 bp, synthetic construct
  source 1..50: mol_type = other DNA
aataactactaccgaatctaaaaaaactaaaaccaaattaccaaactacg

SEQ ID NO: 50747 - DNA, 50 bp, synthetic construct
  source 1..50: mol_type = other DNA
tattttaatttcaaacaacaaacaccaacaacctttcaattaaaattaca

SEQ ID NO: 50748 - DNA, 50 bp, synthetic construct
  source 1..50: mol_type = other DNA
tattttaatttcaaacaacaaacaccgacaacctttcgattaaaattacg

SEQ ID NO: 50749 - DNA, 50 bp, synthetic construct
  source 1..50: mol_type = other DNA
ccaacaacctttcaattaaaattacaaataaaacaataaccttaaaaaca

SEQ ID NO: 50750 - DNA, 50 bp, synthetic construct
  source 1..50: mol_type = other DNA
ccgacaacctttcgattaaaattacgaataaaacaataaccttaaaaacg

SEQ ID NO: 50751 - DNA, 50 bp, synthetic construct
  source 1..50: mol_type = other DNA
acctacaaaaaccataacaaaatacaaaacaaaaccaaactaaaaaaaca

SEQ ID NO: 50752 - DNA, 50 bp, synthetic construct
  source 1..50: mol_type = other DNA
gcctacgaaaaccataacgaaatacaaaacgaaaccgaactaaaaaaacg

SEQ ID NO: 50753 - DNA, 50 bp, synthetic construct
  source 1..50: mol_type = other DNA
actaaaacaaaacctacaaaataaaactaacaacacaaaacaaaacctca

SEQ ID NO: 50754 - DNA, 50 bp, synthetic construct
  source 1..50: mol_type = other DNA
gctaaaacgaaacctacgaaataaaactaacgacacgaaacgaaacctcg

SEQ ID NO: 50755 - DNA, 50 bp, synthetic construct
  source 1..50: mol_type = other DNA
caaaattaacaaactaaacataacccaaccacactataactataaataca

SEQ ID NO: 50756 - DNA, 50 bp, synthetic construct
  source 1..50: mol_type = other DNA
cgaaattaacgaactaaacgtaacccgaccgcactataactataaatacg

SEQ ID NO: 50757 - DNA, 50 bp, synthetic construct
  source 1..50: mol_type = other DNA
acaaactaaacataacccaaccacactataactataaatacaaaactcca

SEQ ID NO: 50758 - DNA, 50 bp, synthetic construct
  source 1..50: mol_type = other DNA
acgaactaaacgtaacccgaccgcactataactataaatacgaaactccg

SEQ ID NO: 50759 - DNA, 50 bp, synthetic construct
  source 1..50: mol_type = other DNA
aatacaaaactccacaacacaaaaacttcaaactaaactaattacaaaca

SEQ ID NO: 50760 - DNA, 50 bp, synthetic construct
  source 1..50: mol_type = other DNA
aatacgaaactccgcgacgcgaaaacttcgaactaaactaattacaaacg

SEQ ID NO: 50761 - DNA, 50 bp, synthetic construct
  source 1..50: mol_type = other DNA
aaaactccacaacacaaaaacttcaaactaaactaattacaaacaaaaca

SEQ ID NO: 50762 - DNA, 50 bp, synthetic construct
  source 1..50: mol_type = other DNA
gaaactccgcgacgcgaaaacttcgaactaaactaattacaaacgaaacg

SEQ ID NO: 50763 - DNA, 50 bp, synthetic construct
  source 1..50: mol_type = other DNA
acttcaaactaaactaattacaaacaaaacacaattttcctaaaaactca

SEQ ID NO: 50764 - DNA, 50 bp, synthetic construct
  source 1..50: mol_type = other DNA
acttcgaactaaactaattacaaacgaaacgcgattttcctaaaaactcg

SEQ ID NO: 50765 - DNA, 50 bp, synthetic construct
  source 1..50: mol_type = other DNA
ctaaactaattacaaacaaaacacaattttcctaaaaactcaaccaaaca

SEQ ID NO: 50766 - DNA, 50 bp, synthetic construct
  source 1..50: mol_type = other DNA
ctaaactaattacaaacgaaacgcgattttcctaaaaactcgaccgaacg

SEQ ID NO: 50767 - DNA, 50 bp, synthetic construct
  source 1..50: mol_type = other DNA
aaaaacaacctaaaataaaataacaaaataaccacacaaaacatatccca

SEQ ID NO: 50768 - DNA, 50 bp, synthetic construct
  source 1..50: mol_type = other DNA
aaaaacgacctaaaataaaataacaaaataaccgcgcaaaacgtatcccg

SEQ ID NO: 50769 - DNA, 50 bp, synthetic construct
  source 1..50: mol_type = other DNA
cacaaaacatatcccaaaaattaaaaatctaaatacacaaactctaccca

SEQ ID NO: 50770 - DNA, 50 bp, synthetic construct
  source 1..50: mol_type = other DNA
cgcaaaacgtatcccgaaaattaaaaatctaaatacgcgaactctacccg

SEQ ID NO: 50771 - DNA, 50 bp, synthetic construct
  source 1..50: mol_type = other DNA
aacatatcccaaaaattaaaaatctaaatacacaaactctacccatttca

SEQ ID NO: 50772 - DNA, 50 bp, synthetic construct
  source 1..50: mol_type = other DNA
aacgtatcccgaaaattaaaaatctaaatacgcgaactctacccgtttcg

SEQ ID NO: 50773 - DNA, 50 bp, synthetic construct
  source 1..50: mol_type = other DNA
aaaaattaaaaatctaaatacacaaactctacccatttcataaaaaaaca

SEQ ID NO: 50774 - DNA, 50 bp, synthetic construct
  source 1..50: mol_type = other DNA
gaaaattaaaaatctaaatacgcgaactctacccgtttcgtaaaaaaacg

SEQ ID NO: 50775 - DNA, 50 bp, synthetic construct
  source 1..50: mol_type = other DNA
aaaaactaaacccaaaaaaactaaaataacttacccaaaacaacacctca

SEQ ID NO: 50776 - DNA, 50 bp, synthetic construct
  source 1..50: mol_type = other DNA
aaaaactaaacccgaaaaaactaaaataacttacccaaaacgacacctcg

SEQ ID NO: 50777 - DNA, 50 bp, synthetic construct
  source 1..50: mol_type = other DNA
aataaaaaacaatttttaaaaccaaaatacaactctaattaactaaaaca

SEQ ID NO: 50778 - DNA, 50 bp, synthetic construct
  source 1..50: mol_type = other DNA
aataaaaaacaatttttaaaaccgaaatacaactctaattaactaaaacg

SEQ ID NO: 50779 - DNA, 50 bp, synthetic construct
  source 1..50: mol_type = other DNA
aaatataaaaaatcaaaaaaccaacaactaaaaaccaaaaacctaaaaca

SEQ ID NO: 50780 - DNA, 50 bp, synthetic construct
  source 1..50: mol_type = other DNA
aaatataaaaaatcaaaaaaccaacgactaaaaaccgaaaacctaaaacg

SEQ ID NO: 50781 - DNA, 50 bp, synthetic construct
  source 1..50: mol_type = other DNA
ccaacaactaaaaaccaaaaacctaaaacaacaaaactaacaaacaaaca

SEQ ID NO: 50782 - DNA, 50 bp, synthetic construct
  source 1..50: mol_type = other DNA
ccaacgactaaaaaccgaaaacctaaaacgacaaaactaacgaacaaacg

SEQ ID NO: 50783 - DNA, 50 bp, synthetic construct
  source 1..50: mol_type = other DNA
caaaaataacctctacatctacacaacataaaaaacacaacctataccca

SEQ ID NO: 50784 - DNA, 50 bp, synthetic construct
  source 1..50: mol_type = other DNA
caaaaataacctctacgtctacgcgacgtaaaaaacacaacctatacccg

SEQ ID NO: 50785 - DNA, 50 bp, synthetic construct
  source 1..50: mol_type = other DNA
atctctacatatacaacacaatcttctcactaaacttccacaaattaaca

SEQ ID NO: 50786 - DNA, 50 bp, synthetic construct
  source 1..50: mol_type = other DNA
atctctacgtatacaacgcgatcttctcactaaacttccgcgaattaacg

SEQ ID NO: 50787 - DNA, 50 bp, synthetic construct
  source 1..50: mol_type = other DNA
ttcaataaaaaaatcacactacacacacaaaaacaaaccaaaaaaacaca

SEQ ID NO: 50788 - DNA, 50 bp, synthetic construct
  source 1..50: mol_type = other DNA
ttcaataaaaaaatcgcgctacacacgcaaaaacaaaccgaaaaaacgcg

SEQ ID NO: 50789 - DNA, 50 bp, synthetic construct
  source 1..50: mol_type = other DNA
caaataaaaaattacaaaaccaaaacaataacaaaaccaaacaaaaacca

SEQ ID NO: 50790 - DNA, 50 bp, synthetic construct
  source 1..50: mol_type = other DNA
cgaataaaaaattacgaaaccaaaacgataacgaaaccgaacgaaaaccg

SEQ ID NO: 50791 - DNA, 50 bp, synthetic construct
  source 1..50: mol_type = other DNA
aataaaaaattacaaaaccaaaacaataacaaaaccaaacaaaaaccaca

SEQ ID NO: 50792 - DNA, 50 bp, synthetic construct
  source 1..50: mol_type = other DNA
aataaaaaattacgaaaccaaaacgataacgaaaccgaacgaaaaccgcg

SEQ ID NO: 50793 - DNA, 50 bp, synthetic construct
  source 1..50: mol_type = other DNA
aaacaacaaaactcaataataaaaaatattcaaaacaaccaaaaaccaca

SEQ ID NO: 50794 - DNA, 50 bp, synthetic construct
  source 1..50: mol_type = other DNA
aaacaacaaaactcgataataaaaaatattcgaaacgaccaaaaaccgcg

SEQ ID NO: 50795 - DNA, 50 bp, synthetic construct
  source 1..50: mol_type = other DNA
ttccacaccaacaaaacaacaaaactcaataataaaaaatattcaaaaca

SEQ ID NO: 50796 - DNA, 50 bp, synthetic construct
  source 1..50: mol_type = other DNA
ttccacgccgacaaaacaacaaaactcgataataaaaaatattcgaaacg

SEQ ID NO: 50797 - DNA, 50 bp, synthetic construct
  source 1..50: mol_type = other DNA
tccatccaaaacccaaccctaaaataactcaaattattaaaaccacaaca

SEQ ID NO: 50798 - DNA, 50 bp, synthetic construct
  source 1..50: mol_type = other DNA
tccatccaaaacccgaccctaaaataactcgaattattaaaaccacgacg

SEQ ID NO: 50799 - DNA, 50 bp, synthetic construct
  source 1..50: mol_type = other DNA
caatttactttattcaacccaaaatatttaataaaaactaacaaacatca

SEQ ID NO: 50800 - DNA, 50 bp, synthetic construct
  source 1..50: mol_type = other DNA
caatttactttattcgacccgaaatatttaataaaaactaacaaacgtcg

SEQ ID NO: 50801 - DNA, 50 bp, synthetic construct
  source 1..50: mol_type = other DNA
ttgtataaattatattttaggaatggtttggaattttgtatttgttgatt

SEQ ID NO: 50802 - DNA, 50 bp, synthetic construct
  source 1..50: mol_type = other DNA
ttgtataaattatattttaggaatggtttggaattttgtatttgttgatc

SEQ ID NO: 50803 - DNA, 50 bp, synthetic construct
  source 1..50: mol_type = other DNA
aaaaaatacattaatttaattcaaaaaaacataacaactcaaaatacaca

SEQ ID NO: 50804 - DNA, 50 bp, synthetic construct
  source 1..50: mol_type = other DNA
aaaaaatacattaatttaattcaaaaaaacgtaacaactcaaaatacgcg

SEQ ID NO: 50805 - DNA, 50 bp, synthetic construct
  source 1..50: mol_type = other DNA
aaccaaacaaaccaataaaaaaaaccacataaataaattaaaaccaaaca

SEQ ID NO: 50806 - DNA, 50 bp, synthetic construct
  source 1..50: mol_type = other DNA
aaccaaacaaaccaataaaaaaaaccgcgtaaataaattaaaaccaaacg

SEQ ID NO: 50807 - DNA, 50 bp, synthetic construct
  source 1..50: mol_type = other DNA
aacataaccttaaaaaactcactcttccaaaacacaccctaaaaaaaaca

SEQ ID NO: 50808 - DNA, 50 bp, synthetic construct
  source 1..50: mol_type = other DNA
gacataaccttaaaaaactcgctcttccgaaacgcaccctaaaaaaaacg

SEQ ID NO: 50809 - DNA, 50 bp, synthetic construct
  source 1..50: mol_type = other DNA
taataataaaaatcccaccaaatccaaaacaataacaacaaaaaaaacca

SEQ ID NO: 50810 - DNA, 50 bp, synthetic construct
  source 1..50: mol_type = other DNA
taataataaaaatcccgccgaatccgaaacgataacaacgaaaaaaaccg

SEQ ID NO: 50811 - DNA, 50 bp, synthetic construct
  source 1..50: mol_type = other DNA
tcaccttacttctacatactttttattccataaaaaattccacccaaaca

SEQ ID NO: 50812 - DNA, 50 bp, synthetic construct
  source 1..50: mol_type = other DNA
tcgccttacttctacatactttttattccgtaaaaaattccgcccgaacg

SEQ ID NO: 50813 - DNA, 50 bp, synthetic construct
  source 1..50: mol_type = other DNA
acatcccttaaaacattttttccatcccaaataaacaaaatataacatca

SEQ ID NO: 50814 - DNA, 50 bp, synthetic construct
  source 1..50: mol_type = other DNA
acgtcccttaaaacgttttttccatcccaaataaacaaaatataacgtcg

SEQ ID NO: 50815 - DNA, 50 bp, synthetic construct
  source 1..50: mol_type = other DNA
caacaaaaaaactcactacacaataaaaacaccccataaaaaataatcca

SEQ ID NO: 50816 - DNA, 50 bp, synthetic construct
  source 1..50: mol_type = other DNA
caacgaaaaaactcgctacgcaataaaaacaccccgtaaaaaataatccg

SEQ ID NO: 50817 - DNA, 50 bp, synthetic construct
  source 1..50: mol_type = other DNA
aaacaaaaaaactaattattaaaaatatcacaataacttatacaacccca

SEQ ID NO: 50818 - DNA, 50 bp, synthetic construct
  source 1..50: mol_type = other DNA
aaacaaaaaaactaattattaaaaatatcgcaataacttatacgaccccg

SEQ ID NO: 50819 - DNA, 50 bp, synthetic construct
  source 1..50: mol_type = other DNA
aaaaaaaacaaccaaacactctacatcaataaaaacctaaaccaaaacca

SEQ ID NO: 50820 - DNA, 50 bp, synthetic construct
  source 1..50: mol_type = other DNA
aaaaaaaacgaccaaacgctctacatcgataaaaacctaaaccgaaaccg

SEQ ID NO: 50821 - DNA, 50 bp, synthetic construct
  source 1..50: mol_type = other DNA
cttaaacttttaaccaccatatacttcccaaaaataaataaaaaactaca

SEQ ID NO: 50822 - DNA, 50 bp, synthetic construct
  source 1..50: mol_type = other DNA
cttaaacttttaaccgccatatacttcccgaaaataaataaaaaactacg

SEQ ID NO: 50823 - DNA, 50 bp, synthetic construct
  source 1..50: mol_type = other DNA
ttaaacccacccaactaaaccaacctctaaaaaaaacattctccaaatca

SEQ ID NO: 50824 - DNA, 50 bp, synthetic construct
  source 1..50: mol_type = other DNA
ttaaacccacccaactaaaccgacctctaaaaaaaacattctccgaatcg

SEQ ID NO: 50825 - DNA, 50 bp, synthetic construct
  source 1..50: mol_type = other DNA
ccaaaaaacccaaaacaaaaataaaacaaaactctactaaaaacaactca

SEQ ID NO: 50826 - DNA, 50 bp, synthetic construct
  source 1..50: mol_type = other DNA
ccgaaaaacccgaaacaaaaataaaacaaaactctactaaaaacgactcg

SEQ ID NO: 50827 - DNA, 50 bp, synthetic construct
  source 1..50: mol_type = other DNA
aataaaactaacaaattatataaatcaaacactaacctaaaacaaaaaca

SEQ ID NO: 50828 - DNA, 50 bp, synthetic construct
  source 1..50: mol_type = other DNA
aataaaactaacgaattatataaatcaaacactaacctaaaacgaaaacg

SEQ ID NO: 50829 - DNA, 50 bp, synthetic construct
  source 1..50: mol_type = other DNA
taaacaaataaaactaacaaattatataaatcaaacactaacctaaaaca

SEQ ID NO: 50830 - DNA, 50 bp, synthetic construct
  source 1..50: mol_type = other DNA
taaacaaataaaactaacgaattatataaatcaaacactaacctaaaacg

SEQ ID NO: 50831 - DNA, 50 bp, synthetic construct
  source 1..50: mol_type = other DNA
ctaactaataaaccacaaaaaactcaaaaaaacaaacatacaactcctca

SEQ ID NO: 50832 - DNA, 50 bp, synthetic construct
  source 1..50: mol_type = other DNA
ctaactaataaaccgcaaaaaactcaaaaaaacaaacatacgactcctcg

SEQ ID NO: 50833 - DNA, 50 bp, synthetic construct
  source 1..50: mol_type = other DNA
ccatttcctcctcaaaactttaaaacatataaaataataataaaaacaca

SEQ ID NO: 50834 - DNA, 50 bp, synthetic construct
  source 1..50: mol_type = other DNA
ccgtttcctcctcaaaactttaaaacatataaaataataataaaaacgcg

SEQ ID NO: 50835 - DNA, 50 bp, synthetic construct
  source 1..50: mol_type = other DNA
actataacattaaaattaaaacaatacaaataaatcatttcctactatca

SEQ ID NO: 50836 - DNA, 50 bp, synthetic construct
  source 1..50: mol_type = other DNA
actataacgttaaaattaaaacgatacgaataaatcgtttcctactatcg

SEQ ID NO: 50837 - DNA, 50 bp, synthetic construct
  source 1..50: mol_type = other DNA
ctaataacacatacatccaaaaataataacctaaccccacctatatccca

SEQ ID NO: 50838 - DNA, 50 bp, synthetic construct
  source 1..50: mol_type = other DNA
ctaataacgcatacgtccaaaaataataacctaaccccacctatatcccg

SEQ ID NO: 50839 - DNA, 50 bp, synthetic construct
  source 1..50: mol_type = other DNA
aagtttgattatagggattaagtttgtaaagtttggaggatagttttatt

SEQ ID NO: 50840 - DNA, 50 bp, synthetic construct
  source 1..50: mol_type = other DNA
aagtttgattatagggattaagttcgtaaagtttggaggatagttttatc

SEQ ID NO: 50841 - DNA, 50 bp, synthetic construct
  source 1..50: mol_type = other DNA
accataaatactaaacctacaaaaacacaaaaaatacacaaaaacctaca

SEQ ID NO: 50842 - DNA, 50 bp, synthetic construct
  source 1..50: mol_type = other DNA
accataaatactaaacctacgaaaacgcgaaaaatacgcgaaaacctacg

SEQ ID NO: 50843 - DNA, 50 bp, synthetic construct
  source 1..50: mol_type = other DNA
aaaacaactcaaacactaaaaccccaaaaaacaaaacaaaacaataccca

SEQ ID NO: 50844 - DNA, 50 bp, synthetic construct
  source 1..50: mol_type = other DNA
aaaacaactcaaacgctaaaaccccgaaaaacgaaacgaaacgatacccg

SEQ ID NO: 50845 - DNA, 50 bp, synthetic construct
  source 1..50: mol_type = other DNA
cctattcaatacacaaaacaaattcaatttaaaatctaaaaacaaaccca

SEQ ID NO: 50846 - DNA, 50 bp, synthetic construct
  source 1..50: mol_type = other DNA
cctattcgatacgcaaaacgaattcgatttaaaatctaaaaacaaacccg

SEQ ID NO: 50847 - DNA, 50 bp, synthetic construct
  source 1..50: mol_type = other DNA
cataaccacacacacacccttatttttcattccctttataaaccaaaaca

SEQ ID NO: 50848 - DNA, 50 bp, synthetic construct
  source 1..50: mol_type = other DNA
cataaccacgcacgcacccttatttttcattccctttataaaccaaaacg

SEQ ID NO: 50849 - DNA, 50 bp, synthetic construct
  source 1..50: mol_type = other DNA
tcaccaaaaaacataaaacatctctaaaacaacaacaccacctaacaaca

SEQ ID NO: 50850 - DNA, 50 bp, synthetic construct
  source 1..50: mol_type = other DNA
tcaccgaaaaacataaaacgtctctaaaacaacaacaccacctaacgacg

SEQ ID NO: 50851 - DNA, 50 bp, synthetic construct
  source 1..50: mol_type = other DNA
caatcaccaaaaaacataaaacatctctaaaacaacaacaccacctaaca

SEQ ID NO: 50852 - DNA, 50 bp, synthetic construct
  source 1..50: mol_type = other DNA
cgatcaccgaaaaacataaaacgtctctaaaacaacaacaccacctaacg

SEQ ID NO: 50853 - DNA, 50 bp, synthetic construct
  source 1..50: mol_type = other DNA
attatttagggagataggagttggtttatatttgttaatttgtggttatt

SEQ ID NO: 50854 - DNA, 50 bp, synthetic construct
  source 1..50: mol_type = other DNA
attatttagggagataggagtcggtttatatttgttaatttgcggttatc

SEQ ID NO: 50855 - DNA, 50 bp, synthetic construct
  source 1..50: mol_type = other DNA
cactaaataatactactacctcaaaaacaccttatacttcccaataacca

SEQ ID NO: 50856 - DNA, 50 bp, synthetic construct
  source 1..50: mol_type = other DNA
cgctaaataatactactacctcaaaaacgccttatacttcccgataaccg

SEQ ID NO: 50857 - DNA, 50 bp, synthetic construct
  source 1..50: mol_type = other DNA
acacacacacaaaaataaaataataaatatattaattcacttaattacca

SEQ ID NO: 50858 - DNA, 50 bp, synthetic construct
  source 1..50: mol_type = other DNA
acacacgcacaaaaataaaataataaatatattaattcacttaattaccg

SEQ ID NO: 50859 - DNA, 50 bp, synthetic construct
  source 1..50: mol_type = other DNA
tcaaaactctacacaaaaccaaatttatctaaataccactctatacaaca

SEQ ID NO: 50860 - DNA, 50 bp, synthetic construct
  source 1..50: mol_type = other DNA
tcaaaactctacacgaaaccaaatttatctaaataccgctctatacgacg

SEQ ID NO: 50861 - DNA, 50 bp, synthetic construct
  source 1..50: mol_type = other DNA
aaactctacacaaaaccaaatttatctaaataccactctatacaacaaca

SEQ ID NO: 50862 - DNA, 50 bp, synthetic construct
  source 1..50: mol_type = other DNA
aaactctacacgaaaccaaatttatctaaataccgctctatacgacgacg

SEQ ID NO: 50863 - DNA, 50 bp, synthetic construct
  source 1..50: mol_type = other DNA
aaaaaaaaaatctcaaaaaaaaatcctaactctctccactaacattccca

SEQ ID NO: 50864 - DNA, 50 bp, synthetic construct
  source 1..50: mol_type = other DNA
aaaaaaaaaatctcaaaaaaaaatcctaactctctccactaacgttcccg

SEQ ID NO: 50865 - DNA, 50 bp, synthetic construct
  source 1..50: mol_type = other DNA
acaaaatctcctccaaaaaacataaccaccaactacccacaacaaaaaca

SEQ ID NO: 50866 - DNA, 50 bp, synthetic construct
  source 1..50: mol_type = other DNA
acaaaatctcctccaaaaaacataaccgccaactacccacaacgaaaacg

SEQ ID NO: 50867 - DNA, 50 bp, synthetic construct
  source 1..50: mol_type = other DNA
ttttcaaccccataattcacatacctcctaacaatactataaaatcccca

SEQ ID NO: 50868 - DNA, 50 bp, synthetic construct
  source 1..50: mol_type = other DNA
ttttcaaccccgtaattcacatacctcctaacgatactataaaatccccg

SEQ ID NO: 50869 - DNA, 50 bp, synthetic construct
  source 1..50: mol_type = other DNA
tagtttagtttggttgtttttgatttaggaagtaagaggttgaaaatatt

SEQ ID NO: 50870 - DNA, 50 bp, synthetic construct
  source 1..50: mol_type = other DNA
tagtttagtttggtcgtttttgatttaggaagtaagaggttgaaaatatc

SEQ ID NO: 50871 - DNA, 50 bp, synthetic construct
  source 1..50: mol_type = other DNA
atccaaaaaacaaaaaattaaaaataccacacactttcatacaaatccca

SEQ ID NO: 50872 - DNA, 50 bp, synthetic construct
  source 1..50: mol_type = other DNA
atccaaaaaacaaaaaattaaaaataccgcacactttcatacaaatcccg

SEQ ID NO: 50873 - DNA, 50 bp, synthetic construct
  source 1..50: mol_type = other DNA
ttgaaaatgagattttgtagtgtggagggaattgttagtttatatgtgtt

SEQ ID NO: 50874 - DNA, 50 bp, synthetic construct
  source 1..50: mol_type = other DNA
ttgaaaatgagattttgtagcgtggagggaattgttagtttatatgtgtc

SEQ ID NO: 50875 - DNA, 50 bp, synthetic construct
  source 1..50: mol_type = other DNA
aaaaataaaaaactaaaacccaaaaacacctaataaaatcaaaaaccaca

SEQ ID NO: 50876 - DNA, 50 bp, synthetic construct
  source 1..50: mol_type = other DNA
aaaaataaaaaactaaaacccgaaaacacctaataaaatcaaaaaccacg

SEQ ID NO: 50877 - DNA, 50 bp, synthetic construct
  source 1..50: mol_type = other DNA
tttaaaaaacaaaatctcactctatcaccccaactaaaatatataacaca

SEQ ID NO: 50878 - DNA, 50 bp, synthetic construct
  source 1..50: mol_type = other DNA
tttaaaaaacaaaatctcactctatcaccccgactaaaatatataacacg

SEQ ID NO: 50879 - DNA, 50 bp, synthetic construct
  source 1..50: mol_type = other DNA
taccactcaaacccactaccaaaacatctcatattaaactaaaccaatca

SEQ ID NO: 50880 - DNA, 50 bp, synthetic construct
  source 1..50: mol_type = other DNA
taccactcgaacccgctaccaaaacatctcgtattaaactaaaccaatcg

SEQ ID NO: 50881 - DNA, 50 bp, synthetic construct
  source 1..50: mol_type = other DNA
aacataaactctacccacaaaaataaaaacccatttcctaaaaacaccca

SEQ ID NO: 50882 - DNA, 50 bp, synthetic construct
  source 1..50: mol_type = other DNA
aacataaactctacccgcaaaaataaaaacccgtttcctaaaaacacccg

SEQ ID NO: 50883 - DNA, 50 bp, synthetic construct
  source 1..50: mol_type = other DNA
caacttccccaaacacctaaacctcaaaacaccaaacttaaacttttcca

SEQ ID NO: 50884 - DNA, 50 bp, synthetic construct
  source 1..50: mol_type = other DNA
caacttccccaaacacctaaacctcaaaacaccgaacttaaacttttccg

SEQ ID NO: 50885 - DNA, 50 bp, synthetic construct
  source 1..50: mol_type = other DNA
cacaatctcatcttacaatacatcaataaccacacttatctctactctca

SEQ ID NO: 50886 - DNA, 50 bp, synthetic construct
  source 1..50: mol_type = other DNA
cacgatctcatcttacaatacatcgataaccacacttatctctactctcg

SEQ ID NO: 50887 - DNA, 50 bp, synthetic construct
  source 1..50: mol_type = other DNA
taacaaaaacaaatacttccctaaaacaatcccaaaactcaaaaacatca

SEQ ID NO: 50888 - DNA, 50 bp, synthetic construct
  source 1..50: mol_type = other DNA
taacgaaaacaaatacttccctaaaacgatcccgaaactcaaaaacatcg

SEQ ID NO: 50889 - DNA, 50 bp, synthetic construct
  source 1..50: mol_type = other DNA
tcatttccaccctcatattcaatacccacaaaacataaatcatactaaca

SEQ ID NO: 50890 - DNA, 50 bp, synthetic construct
  source 1..50: mol_type = other DNA
tcatttccaccctcgtattcaatacccacgaaacataaatcatactaacg

SEQ ID NO: 50891 - DNA, 50 bp, synthetic construct
  source 1..50: mol_type = other DNA
aattccctctccccatttacataccccaacaaataataaaaaccactcca

SEQ ID NO: 50892 - DNA, 50 bp, synthetic construct
  source 1..50: mol_type = other DNA
aattccctctccccatttacataccccaacgaataataaaaaccactccg

SEQ ID NO: 50893 - DNA, 50 bp, synthetic construct
  source 1..50: mol_type = other DNA
ctttaactccactctacaacactaactcccaaaccaaactaaacataaca

SEQ ID NO: 50894 - DNA, 50 bp, synthetic construct
  source 1..50: mol_type = other DNA
ctttaactccactctacaacactaactcccgaaccaaactaaacgtaacg

SEQ ID NO: 50895 - DNA, 50 bp, synthetic construct
  source 1..50: mol_type = other DNA
acttattaaaccaccaacctaaccaaaaaccaaaaactatcctttaccca

SEQ ID NO: 50896 - DNA, 50 bp, synthetic construct
  source 1..50: mol_type = other DNA
acttattaaaccgccgacctaaccaaaaaccaaaaactatcctttacccg

SEQ ID NO: 50897 - DNA, 50 bp, synthetic construct
  source 1..50: mol_type = other DNA
taatctctaaccaaaccaacaactcaacaaatatccaaacaaaccatcca

SEQ ID NO: 50898 - DNA, 50 bp, synthetic construct
  source 1..50: mol_type = other DNA
taatctctaaccaaaccgacgactcaacaaatatccaaacaaaccatccg

SEQ ID NO: 50899 - DNA, 50 bp, synthetic construct
  source 1..50: mol_type = other DNA
caaatatccaaacaaaccatccatatacccaatatctacctaaactacca

SEQ ID NO: 50900 - DNA, 50 bp, synthetic construct
  source 1..50: mol_type = other DNA
caaatatccaaacaaaccatccgtatacccgatatctacctaaactaccg

SEQ ID NO: 50901 - DNA, 50 bp, synthetic construct
  source 1..50: mol_type = other DNA
ccaactttacctacaacccctaaaaaaacaaaaactcccaaaaattcaca

SEQ ID NO: 50902 - DNA, 50 bp, synthetic construct
  source 1..50: mol_type = other DNA
ccaactttacctacaacccctaaaaaaacaaaaactcccaaaaattcacg

SEQ ID NO: 50903 - DNA, 50 bp, synthetic construct
  source 1..50: mol_type = other DNA
cccatctcaaaactaaccacccttacacaaatcaaaaccttatacaaaca

SEQ ID NO: 50904 - DNA, 50 bp, synthetic construct
  source 1..50: mol_type = other DNA
cccgtctcgaaactaaccacccttacacaaatcaaaaccttatacaaacg

SEQ ID NO: 50905 - DNA, 50 bp, synthetic construct
  source 1..50: mol_type = other DNA
ctaaaaccatccctcaatctaaatcaaaaatccctatctaatacatccca

SEQ ID NO: 50906 - DNA, 50 bp, synthetic construct
  source 1..50: mol_type = other DNA
ctaaaaccatccctcgatctaaatcaaaaatccctatctaatacgtcccg

SEQ ID NO: 50907 - DNA, 50 bp, synthetic construct
  source 1..50: mol_type = other DNA
caaacttaccaacctatcctttcatctctatcttactcccaaacaaccca

SEQ ID NO: 50908 - DNA, 50 bp, synthetic construct
  source 1..50: mol_type = other DNA
caaacttaccaacctatcctttcatctctatcttactcccaaacaacccg

SEQ ID NO: 50909 - DNA, 50 bp, synthetic construct
  source 1..50: mol_type = other DNA
ccaaaatcacacaaccaacaaaaaaccaaacccaaattaaaccccaacca

SEQ ID NO: 50910 - DNA, 50 bp, synthetic construct
  source 1..50: mol_type = other DNA
ccaaaatcacacaaccaacaaaaaaccaaacccgaattaaaccccaaccg

SEQ ID NO: 50911 - DNA, 50 bp, synthetic construct
  source 1..50: mol_type = other DNA
aaaccaaaaaactacaaacactaccaataaaaaaaaccaaacaacccaca

SEQ ID NO: 50912 - DNA, 50 bp, synthetic construct
  source 1..50: mol_type = other DNA
aaaccaaaaaactacaaacgctaccaataaaaaaaaccaaacgacccacg

SEQ ID NO: 50913 - DNA, 50 bp, synthetic construct
  source 1..50: mol_type = other DNA
cccaaaacaaacaacaaaaaaatctcaaactaaataataaaaaaccacca

SEQ ID NO: 50914 - DNA, 50 bp, synthetic construct
  source 1..50: mol_type = other DNA
cccaaaacgaacaacgaaaaaatctcaaactaaataataaaaaaccaccg

SEQ ID NO: 50915 - DNA, 50 bp, synthetic construct
  source 1..50: mol_type = other DNA
acctatttcaattttactaacaaaacccactacctacttaatcactacca

SEQ ID NO: 50916 - DNA, 50 bp, synthetic construct
  source 1..50: mol_type = other DNA
acctatttcgattttactaacaaaacccgctacctacttaatcgctaccg

SEQ ID NO: 50917 - DNA, 50 bp, synthetic construct
  source 1..50: mol_type = other DNA
ataaaacaccacacaaacaactaactaccaaaactactcacaaaaacaca

SEQ ID NO: 50918 - DNA, 50 bp, synthetic construct
  source 1..50: mol_type = other DNA
ataaaacgccacgcaaacaactaactaccaaaactactcgcaaaaacgcg

SEQ ID NO: 50919 - DNA, 50 bp, synthetic construct
  source 1..50: mol_type = other DNA
aacaatcaatactcctatactaacctctaactcctcaaaaaacacaacca

SEQ ID NO: 50920 - DNA, 50 bp, synthetic construct
  source 1..50: mol_type = other DNA
aacgatcgatactcctatactaacctctaactcctcaaaaaacacaaccg

SEQ ID NO: 50921 - DNA, 50 bp, synthetic construct
  source 1..50: mol_type = other DNA
tcaactaaaacaatatcaaatcacctttaaactaacaaaaactcattaca

SEQ ID NO: 50922 - DNA, 50 bp, synthetic construct
  source 1..50: mol_type = other DNA
tcaactaaaacgatatcgaatcgcctttaaactaacgaaaactcgttacg

SEQ ID NO: 50923 - DNA, 50 bp, synthetic construct
  source 1..50: mol_type = other DNA
tctcttcaactaaaacaatatcaaatcacctttaaactaacaaaaactca

SEQ ID NO: 50924 - DNA, 50 bp, synthetic construct
  source 1..50: mol_type = other DNA
tctcttcaactaaaacgatatcgaatcgcctttaaactaacgaaaactcg

SEQ ID NO: 50925 - DNA, 50 bp, synthetic construct
  source 1..50: mol_type = other DNA
aactaacctctcttcaactaaaacaatatcaaatcacctttaaactaaca

SEQ ID NO: 50926 - DNA, 50 bp, synthetic construct
  source 1..50: mol_type = other DNA
aactaacctctcttcaactaaaacgatatcgaatcgcctttaaactaacg

SEQ ID NO: 50927 - DNA, 50 bp, synthetic construct
  source 1..50: mol_type = other DNA
actccaattcctcaaaaataaaaaaaccaaattcaaaaacataaaccaca

SEQ ID NO: 50928 - DNA, 50 bp, synthetic construct
  source 1..50: mol_type = other DNA
actccaattcctcaaaaataaaaaaaccgaattcaaaaacataaaccgcg

SEQ ID NO: 50929 - DNA, 50 bp, synthetic construct
  source 1..50: mol_type = other DNA
aattttccaaaacacacacacaaaaccaaacttaactacttcacataaca

SEQ ID NO: 50930 - DNA, 50 bp, synthetic construct
  source 1..50: mol_type = other DNA
aattttccaaaacgcacgcgcgaaaccgaacttaactacttcacataacg

SEQ ID NO: 50931 - DNA, 50 bp, synthetic construct
  source 1..50: mol_type = other DNA
atcctcccacaaaacaaaccaacaacaaactaaattacattctcaaaaca

SEQ ID NO: 50932 - DNA, 50 bp, synthetic construct
  source 1..50: mol_type = other DNA
atcctcccgcaaaacaaaccgacgacgaactaaattacattctcaaaacg

SEQ ID NO: 50933 - DNA, 50 bp, synthetic construct
  source 1..50: mol_type = other DNA
caaaaataactcaaattaccacatacactctaaaaatacaatttaactca

SEQ ID NO: 50934 - DNA, 50 bp, synthetic construct
  source 1..50: mol_type = other DNA
cgaaaataactcgaattaccgcatacgctctaaaaatacaatttaactcg

SEQ ID NO: 50935 - DNA, 50 bp, synthetic construct
  source 1..50: mol_type = other DNA
aaaaaaaattccacacatacatatactcatctcttaacaataattttaca

SEQ ID NO: 50936 - DNA, 50 bp, synthetic construct
  source 1..50: mol_type = other DNA
aaaaaaaattccgcgcgtacgtatactcgtctcttaacaataattttacg

SEQ ID NO: 50937 - DNA, 50 bp, synthetic construct
  source 1..50: mol_type = other DNA
actcatctcttaacaataattttacacatacataaaaacaaacccttaca

SEQ ID NO: 50938 - DNA, 50 bp, synthetic construct
  source 1..50: mol_type = other DNA
actcgtctcttaacaataattttacgcatacgtaaaaacaaacccttacg

SEQ ID NO: 50939 - DNA, 50 bp, synthetic construct
  source 1..50: mol_type = other DNA
ataattttacacatacataaaaacaaacccttacaacaaactactataca

SEQ ID NO: 50940 - DNA, 50 bp, synthetic construct
  source 1..50: mol_type = other DNA
ataattttacgcatacgtaaaaacaaacccttacgacgaactactatacg

SEQ ID NO: 50941 - DNA, 50 bp, synthetic construct
  source 1..50: mol_type = other DNA
acacatacataaaaacaaacccttacaacaaactactatacactttaaca

SEQ ID NO: 50942 - DNA, 50 bp, synthetic construct
  source 1..50: mol_type = other DNA
acgcatacgtaaaaacaaacccttacgacgaactactatacgctttaacg

SEQ ID NO: 50943 - DNA, 50 bp, synthetic construct
  source 1..50: mol_type = other DNA
aaaaacaaacccttacaacaaactactatacactttaacaattcttaaca

SEQ ID NO: 50944 - DNA, 50 bp, synthetic construct
  source 1..50: mol_type = other DNA
aaaaacaaacccttacgacgaactactatacgctttaacgattcttaacg

SEQ ID NO: 50945 - DNA, 50 bp, synthetic construct
  source 1..50: mol_type = other DNA
aacaaacccttacaacaaactactatacactttaacaattcttaacatca

SEQ ID NO: 50946 - DNA, 50 bp, synthetic construct
  source 1..50: mol_type = other DNA
aacaaacccttacgacgaactactatacgctttaacgattcttaacgtcg

SEQ ID NO: 50947 - DNA, 50 bp, synthetic construct
  source 1..50: mol_type = other DNA
actatacactttaacaattcttaacatcacattaatataaacctaataca

SEQ ID NO: 50948 - DNA, 50 bp, synthetic construct
  source 1..50: mol_type = other DNA
actatacgctttaacgattcttaacgtcgcgttaatataaacctaatacg

SEQ ID NO: 50949 - DNA, 50 bp, synthetic construct
  source 1..50: mol_type = other DNA
ccaaaactacatttctcacaactcatatttaaaacctaacaacaaaatca

SEQ ID NO: 50950 - DNA, 50 bp, synthetic construct
  source 1..50: mol_type = other DNA
ccgaaactacatttctcgcgactcatatttaaaacctaacgacgaaatcg

SEQ ID NO: 50951 - DNA, 50 bp, synthetic construct
  source 1..50: mol_type = other DNA
cacaaaacaaactaaaaacaattccaccatcaaatcccaaatataaacca

SEQ ID NO: 50952 - DNA, 50 bp, synthetic construct
  source 1..50: mol_type = other DNA
cgcaaaacaaactaaaaacgattccgccgtcaaatcccaaatataaaccg

SEQ ID NO: 50953 - DNA, 50 bp, synthetic construct
  source 1..50: mol_type = other DNA
ccatcaaatcccaaatataaaccacaaaaaatacaaccccaaaaaaaaca

SEQ ID NO: 50954 - DNA, 50 bp, synthetic construct
  source 1..50: mol_type = other DNA
ccgtcaaatcccaaatataaaccgcgaaaaatacaaccccgaaaaaaacg

SEQ ID NO: 50955 - DNA, 50 bp, synthetic construct
  source 1..50: mol_type = other DNA
accctaaaaaaaaatacttataactcaataaaacttaacaataaacatca

SEQ ID NO: 50956 - DNA, 50 bp, synthetic construct
  source 1..50: mol_type = other DNA
accctaaaaaaaaatacttataactcgataaaacttaacgataaacatcg

SEQ ID NO: 50957 - DNA, 50 bp, synthetic construct
  source 1..50: mol_type = other DNA
aaaaaaaaatacttataactcaataaaacttaacaataaacatcaataca

SEQ ID NO: 50958 - DNA, 50 bp, synthetic construct
  source 1..50: mol_type = other DNA
aaaaaaaaatacttataactcgataaaacttaacgataaacatcgatacg

SEQ ID NO: 50959 - DNA, 50 bp, synthetic construct
  source 1..50: mol_type = other DNA
aatacttataactcaataaaacttaacaataaacatcaatacatttccca

SEQ ID NO: 50960 - DNA, 50 bp, synthetic construct
  source 1..50: mol_type = other DNA
aatacttataactcgataaaacttaacgataaacatcgatacgtttcccg

SEQ ID NO: 50961 - DNA, 50 bp, synthetic construct
  source 1..50: mol_type = other DNA
tataactcaataaaacttaacaataaacatcaatacatttcccaacaaca

SEQ ID NO: 50962 - DNA, 50 bp, synthetic construct
  source 1..50: mol_type = other DNA
tataactcgataaaacttaacgataaacatcgatacgtttcccgacaacg

SEQ ID NO: 50963 - DNA, 50 bp, synthetic construct
  source 1..50: mol_type = other DNA
taaaacttaacaataaacatcaatacatttcccaacaacaataaaaatca

SEQ ID NO: 50964 - DNA, 50 bp, synthetic construct
  source 1..50: mol_type = other DNA
taaaacttaacgataaacatcgatacgtttcccgacaacgataaaaatcg

SEQ ID NO: 50965 - DNA, 50 bp, synthetic construct
  source 1..50: mol_type = other DNA
aacttaacaataaacatcaatacatttcccaacaacaataaaaatcacca

SEQ ID NO: 50966 - DNA, 50 bp, synthetic construct
  source 1..50: mol_type = other DNA
aacttaacgataaacatcgatacgtttcccgacaacgataaaaatcgccg

SEQ ID NO: 50967 - DNA, 50 bp, synthetic construct
  source 1..50: mol_type = other DNA
atcaccatactcaaaaaaactcaaaaacaaacccaaaaacaaaaaataca

SEQ ID NO: 50968 - DNA, 50 bp, synthetic construct
  source 1..50: mol_type = other DNA
atcgccgtactcaaaaaaactcgaaaacaaacccgaaaacaaaaaatacg

SEQ ID NO: 50969 - DNA, 50 bp, synthetic construct
  source 1..50: mol_type = other DNA
accaataaacatatctctacccactaacaaaaaactaaactaaatcccca

SEQ ID NO: 50970 - DNA, 50 bp, synthetic construct
  source 1..50: mol_type = other DNA
accaataaacgtatctctacccactaacgaaaaactaaactaaatccccg

SEQ ID NO: 50971 - DNA, 50 bp, synthetic construct
  source 1..50: mol_type = other DNA
aaaaaataacacaataccacctactacccatttcccttataacttcccca

SEQ ID NO: 50972 - DNA, 50 bp, synthetic construct
  source 1..50: mol_type = other DNA
aaaaaataacacgataccacctactacccatttcccttataacttccccg

SEQ ID NO: 50973 - DNA, 50 bp, synthetic construct
  source 1..50: mol_type = other DNA
atcctcccacaaaaactaacaaaaaccatctcccaaaacatatcaaaaca

SEQ ID NO: 50974 - DNA, 50 bp, synthetic construct
  source 1..50: mol_type = other DNA
atcctcccacaaaaactaacgaaaaccatctcccaaaacgtatcaaaacg

SEQ ID NO: 50975 - DNA, 50 bp, synthetic construct
  source 1..50: mol_type = other DNA
aaaacaacaatacatccctacaaaacacaacaaaaaaacatcctaacaca

SEQ ID NO: 50976 - DNA, 50 bp, synthetic construct
  source 1..50: mol_type = other DNA
aaaacgacaatacgtccctacgaaacacaacaaaaaaacgtcctaacacg

SEQ ID NO: 50977 - DNA, 50 bp, synthetic construct
  source 1..50: mol_type = other DNA
acaaaacacaacaaaaaaacatcctaacacatcctaaaaaataacctcca

SEQ ID NO: 50978 - DNA, 50 bp, synthetic construct
  source 1..50: mol_type = other DNA
acgaaacacaacaaaaaaacgtcctaacacgtcctaaaaaataacctccg

SEQ ID NO: 50979 - DNA, 50 bp, synthetic construct
  source 1..50: mol_type = other DNA
atacctaaataaaaaaactataacaaatattacaaatcttcaccacatca

SEQ ID NO: 50980 - DNA, 50 bp, synthetic construct
  source 1..50: mol_type = other DNA
atacctaaataaaaaaactataacaaatattacaaatcttcaccgcgtcg

SEQ ID NO: 50981 - DNA, 50 bp, synthetic construct
  source 1..50: mol_type = other DNA
acacaaaaattacaaaacaaacaaacaaaaaacaacccaaaaaatacaca

SEQ ID NO: 50982 - DNA, 50 bp, synthetic construct
  source 1..50: mol_type = other DNA
acacaaaaattacgaaacgaacaaacgaaaaacaacccgaaaaatacgcg

SEQ ID NO: 50983 - DNA, 50 bp, synthetic construct
  source 1..50: mol_type = other DNA
aaacacaaaaattacaaaacaaacaaacaaaaaacaacccaaaaaataca

SEQ ID NO: 50984 - DNA, 50 bp, synthetic construct
  source 1..50: mol_type = other DNA
aaacacaaaaattacgaaacgaacaaacgaaaaacaacccgaaaaatacg

SEQ ID NO: 50985 - DNA, 50 bp, synthetic construct
  source 1..50: mol_type = other DNA
aaaccatctaaacacaaaaattacaaaacaaacaaacaaaaaacaaccca

SEQ ID NO: 50986 - DNA, 50 bp, synthetic construct
  source 1..50: mol_type = other DNA
aaaccatctaaacacaaaaattacgaaacgaacaaacgaaaaacaacccg

SEQ ID NO: 50987 - DNA, 50 bp, synthetic construct
  source 1..50: mol_type = other DNA
cactcaaaaaactaaaaccaaaaccatctaaacacaaaaattacaaaaca

SEQ ID NO: 50988 - DNA, 50 bp, synthetic construct
  source 1..50: mol_type = other DNA
cactcaaaaaactaaaaccaaaaccatctaaacacaaaaattacgaaacg

SEQ ID NO: 50989 - DNA, 50 bp, synthetic construct
  source 1..50: mol_type = other DNA
taggtgtatttaagaagttaaggttagggttatttgagtataaagattgt

SEQ ID NO: 50990 - DNA, 50 bp, synthetic construct
  source 1..50: mol_type = other DNA
taggtgtatttaagaagttaaggttagggttatttgagtataaagattgc

SEQ ID NO: 50991 - DNA, 50 bp, synthetic construct
  source 1..50: mol_type = other DNA
aaactactacccaacaccaatactaaaaaccccctactacttctacaaca

SEQ ID NO: 50992 - DNA, 50 bp, synthetic construct
  source 1..50: mol_type = other DNA
aaactactacccaacgccaatactaaaaaccccctactacttctacaacg

SEQ ID NO: 50993 - DNA, 50 bp, synthetic construct
  source 1..50: mol_type = other DNA
aattcaataacaatactaacaccaccttctacaaaacacctctaaactca

SEQ ID NO: 50994 - DNA, 50 bp, synthetic construct
  source 1..50: mol_type = other DNA
aattcgataacaatactaacaccaccttctacaaaacgcctctaaactcg

SEQ ID NO: 50995 - DNA, 50 bp, synthetic construct
  source 1..50: mol_type = other DNA
attgaattgagaaaggtatagagtataagtgtttgtagttatagtttatt

SEQ ID NO: 50996 - DNA, 50 bp, synthetic construct
  source 1..50: mol_type = other DNA
atcgaattgagaaaggtatagagtataagcgtttgtagttatagtttatc

SEQ ID NO: 50997 - DNA, 50 bp, synthetic construct
  source 1..50: mol_type = other DNA
caaatacttatacccatatatattaaaaacacactcacaccaaatcccca

SEQ ID NO: 50998 - DNA, 50 bp, synthetic construct
  source 1..50: mol_type = other DNA
caaatacttatacccatatatattaaaaacgcactcacgccgaatccccg

SEQ ID NO: 50999 - DNA, 50 bp, synthetic construct
  source 1..50: mol_type = other DNA
atacctcccaaatacttatacccatatatattaaaaacacactcacacca

SEQ ID NO: 51000 - DNA, 50 bp, synthetic construct
  source 1..50: mol_type = other DNA
atacctcccaaatacttatacccatatatattaaaaacgcactcacgccg

SEQ ID NO: 51001 - DNA, 50 bp, synthetic construct
  source 1..50: mol_type = other DNA
aaaactaaatatatcaaaaacaaaaataaaacctcacaataatatactca

SEQ ID NO: 51002 - DNA, 50 bp, synthetic construct
  source 1..50: mol_type = other DNA
gaaactaaatatatcaaaaacgaaaataaaacctcacaataatatactcg

SEQ ID NO: 51003 - DNA, 50 bp, synthetic construct
  source 1..50: mol_type = other DNA
ccaactcctcaaaaataccactaaaaaactctaccaaacactcaccaaca

SEQ ID NO: 51004 - DNA, 50 bp, synthetic construct
  source 1..50: mol_type = other DNA
ccaactcctcaaaaataccactaaaaaactctaccgaacactcaccaacg

SEQ ID NO: 51005 - DNA, 50 bp, synthetic construct
  source 1..50: mol_type = other DNA
ctaattaaaactctcatcaaaaaacaacaaacaaaaacaaaaaacccaca

SEQ ID NO: 51006 - DNA, 50 bp, synthetic construct
  source 1..50: mol_type = other DNA
ctaattaaaactctcatcaaaaaacaacgaacaaaaacaaaaaacccgcg

SEQ ID NO: 51007 - DNA, 50 bp, synthetic construct
  source 1..50: mol_type = other DNA
ttcaacacattactcaataatatactcaaaacctacataaactcccacca

SEQ ID NO: 51008 - DNA, 50 bp, synthetic construct
  source 1..50: mol_type = other DNA
ttcaacgcattactcaataatatactcaaaacctacgtaaactcccgccg

SEQ ID NO: 51009 - DNA, 50 bp, synthetic construct
  source 1..50: mol_type = other DNA
taaaacacaaaaaaataaactaactcacccaaaattacaccacaaaacca

SEQ ID NO: 51010 - DNA, 50 bp, synthetic construct
  source 1..50: mol_type = other DNA
taaaacgcaaaaaaataaactaactcgcccaaaattacaccacaaaaccg

SEQ ID NO: 51011 - DNA, 50 bp, synthetic construct
  source 1..50: mol_type = other DNA
actccaaccaaatacccaaattttaaatatttacacaaaatctcctaaca

SEQ ID NO: 51012 - DNA, 50 bp, synthetic construct
  source 1..50: mol_type = other DNA
actccaaccgaatacccgaattttaaatatttacacaaaatctcctaacg

SEQ ID NO: 51013 - DNA, 50 bp, synthetic construct
  source 1..50: mol_type = other DNA
ataaaataaacaaaacaaacaataaaatccaaccccaaaatcaatcccca

SEQ ID NO: 51014 - DNA, 50 bp, synthetic construct
  source 1..50: mol_type = other DNA
ataaaataaacgaaacaaacaataaaatccgaccccgaaatcgatccccg

SEQ ID NO: 51015 - DNA, 50 bp, synthetic construct
  source 1..50: mol_type = other DNA
atatccactaacacaacctaaaatacacttaaactccctaataaataaca

SEQ ID NO: 51016 - DNA, 50 bp, synthetic construct
  source 1..50: mol_type = other DNA
gtatccgctaacgcgacctaaaatacgcttaaactccctaataaataacg

SEQ ID NO: 51017 - DNA, 50 bp, synthetic construct
  source 1..50: mol_type = other DNA
actaacaaatacaatcacaaaataaactcttcttcctttaaaacaaaaca

SEQ ID NO: 51018 - DNA, 50 bp, synthetic construct
  source 1..50: mol_type = other DNA
gctaacgaatacgatcgcaaaataaactcttcttcctttaaaacgaaacg

SEQ ID NO: 51019 - DNA, 50 bp, synthetic construct
  source 1..50: mol_type = other DNA
acaaatacaatcacaaaataaactcttcttcctttaaaacaaaacaaaca

SEQ ID NO: 51020 - DNA, 50 bp, synthetic construct
  source 1..50: mol_type = other DNA
acgaatacgatcgcaaaataaactcttcttcctttaaaacgaaacgaacg

SEQ ID NO: 51021 - DNA, 50 bp, synthetic construct
  source 1..50: mol_type = other DNA
aaatacaatcacaaaataaactcttcttcctttaaaacaaaacaaacaca

SEQ ID NO: 51022 - DNA, 50 bp, synthetic construct
  source 1..50: mol_type = other DNA
gaatacgatcgcaaaataaactcttcttcctttaaaacgaaacgaacgcg

SEQ ID NO: 51023 - DNA, 50 bp, synthetic construct
  source 1..50: mol_type = other DNA
acaatcacaaaataaactcttcttcctttaaaacaaaacaaacacaaaca

SEQ ID NO: 51024 - DNA, 50 bp, synthetic construct
  source 1..50: mol_type = other DNA
acgatcgcaaaataaactcttcttcctttaaaacgaaacgaacgcgaacg

SEQ ID NO: 51025 - DNA, 50 bp, synthetic construct
  source 1..50: mol_type = other DNA
aacaataacacaaacaaaaaaccaaaaatacatcactcaacaaacaaaca

SEQ ID NO: 51026 - DNA, 50 bp, synthetic construct
  source 1..50: mol_type = other DNA
aacaataacgcaaacgaaaaaccgaaaatacgtcactcaacgaacgaacg

SEQ ID NO: 51027 - DNA, 50 bp, synthetic construct
  source 1..50: mol_type = other DNA
attattaaaaatcaaaaacaaacataatttaaaatctaacccacaaaaca

SEQ ID NO: 51028 - DNA, 50 bp, synthetic construct
  source 1..50: mol_type = other DNA
attattaaaaatcgaaaacgaacgtaatttaaaatctaacccacgaaacg

SEQ ID NO: 51029 - DNA, 50 bp, synthetic construct
  source 1..50: mol_type = other DNA
aaactaaatataacctcaacatcaaaaatataaactctaatccaatcaca

SEQ ID NO: 51030 - DNA, 50 bp, synthetic construct
  source 1..50: mol_type = other DNA
aaactaaatataacctcgacgtcaaaaatataaactctaatccgatcgcg

SEQ ID NO: 51031 - DNA, 50 bp, synthetic construct
  source 1..50: mol_type = other DNA
taacctcaacatcaaaaatataaactctaatccaatcacaataactcaca

SEQ ID NO: 51032 - DNA, 50 bp, synthetic construct
  source 1..50: mol_type = other DNA
taacctcgacgtcaaaaatataaactctaatccgatcgcgataactcacg

SEQ ID NO: 51033 - DNA, 50 bp, synthetic construct
  source 1..50: mol_type = other DNA
cattttattccaaaaccaaaaaaatccactacaaaattctccactaaaca

SEQ ID NO: 51034 - DNA, 50 bp, synthetic construct
  source 1..50: mol_type = other DNA
cgttttattccgaaaccaaaaaaatccactacaaaattctccgctaaacg

SEQ ID NO: 51035 - DNA, 50 bp, synthetic construct
  source 1..50: mol_type = other DNA
tccaaaaccaaaaaaatccactacaaaattctccactaaacataacctca

SEQ ID NO: 51036 - DNA, 50 bp, synthetic construct
  source 1..50: mol_type = other DNA
tccgaaaccaaaaaaatccactacaaaattctccgctaaacgtaacctcg

SEQ ID NO: 51037 - DNA, 50 bp, synthetic construct
  source 1..50: mol_type = other DNA
acaaaaatctcactaccaacaccaactttaaaaaacactaaatatccaca

SEQ ID NO: 51038 - DNA, 50 bp, synthetic construct
  source 1..50: mol_type = other DNA
acgaaaatctcactaccaacaccgactttaaaaaacgctaaatatccacg

SEQ ID NO: 51039 - DNA, 50 bp, synthetic construct
  source 1..50: mol_type = other DNA
aaaattaaactatcaaaaaccacacaacccctcttctccaaacaataaca

SEQ ID NO: 51040 - DNA, 50 bp, synthetic construct
  source 1..50: mol_type = other DNA
aaaattaaactatcgaaaaccacgcaacccctcttctccgaacaataacg

SEQ ID NO: 51041 - DNA, 50 bp, synthetic construct
  source 1..50: mol_type = other DNA
tccaaacaataacacccaaccctacactcaaaaaatcaataaaaacttca

SEQ ID NO: 51042 - DNA, 50 bp, synthetic construct
  source 1..50: mol_type = other DNA
tccgaacaataacgcccaaccctacgctcaaaaaatcaataaaaacttcg

SEQ ID NO: 51043 - DNA, 50 bp, synthetic construct
  source 1..50: mol_type = other DNA
taatcacaattattaaatccatctaatattcaaaaacaaaaaccacccca

SEQ ID NO: 51044 - DNA, 50 bp, synthetic construct
  source 1..50: mol_type = other DNA
taatcgcgattattaaatccatctaatattcgaaaacgaaaaccgccccg

SEQ ID NO: 51045 - DNA, 50 bp, synthetic construct
  source 1..50: mol_type = other DNA
atcaataatcacaattattaaatccatctaatattcaaaaacaaaaacca

SEQ ID NO: 51046 - DNA, 50 bp, synthetic construct
  source 1..50: mol_type = other DNA
atcaataatcgcgattattaaatccatctaatattcgaaaacgaaaaccg

SEQ ID NO: 51047 - DNA, 50 bp, synthetic construct
  source 1..50: mol_type = other DNA
acactcaaaatatataaacacatattacattcaactttactttacaaaca

SEQ ID NO: 51048 - DNA, 50 bp, synthetic construct
  source 1..50: mol_type = other DNA
acactcgaaatatataaacgcgtattacgttcaactttactttacaaacg

SEQ ID NO: 51049 - DNA, 50 bp, synthetic construct
  source 1..50: mol_type = other DNA
aatagatttagaaagtggaagtttttagaaagttaatttgggttgggtat

SEQ ID NO: 51050 - DNA, 50 bp, synthetic construct
  source 1..50: mol_type = other DNA
aatagatttagaaagtggaagtttttagaaagttaatttgggttgggtac

SEQ ID NO: 51051 - DNA, 50 bp, synthetic construct
  source 1..50: mol_type = other DNA
tcaaatttctttatcaaaaatacaccaaaattctctcaaaaaaaaaccca

SEQ ID NO: 51052 - DNA, 50 bp, synthetic construct
  source 1..50: mol_type = other DNA
tcaaatttctttatcgaaaatacaccaaaattctctcgaaaaaaaacccg

SEQ ID NO: 51053 - DNA, 50 bp, synthetic construct
  source 1..50: mol_type = other DNA
caattcacaccaatatctccaacactctactactaacctaaaacaaccca

SEQ ID NO: 51054 - DNA, 50 bp, synthetic construct
  source 1..50: mol_type = other DNA
caattcacaccaatatctccgacactctactactaacctaaaacaacccg

SEQ ID NO: 51055 - DNA, 50 bp, synthetic construct
  source 1..50: mol_type = other DNA
aaaattactaaaactacaataaacaaaattacctacaataacaaaaaaca

SEQ ID NO: 51056 - DNA, 50 bp, synthetic construct
  source 1..50: mol_type = other DNA
aaaattactaaaactacgataaacaaaattacctacgataacgaaaaacg

SEQ ID NO: 51057 - DNA, 50 bp, synthetic construct
  source 1..50: mol_type = other DNA
aactcaaaaaattactaaaactacaataaacaaaattacctacaataaca

SEQ ID NO: 51058 - DNA, 50 bp, synthetic construct
  source 1..50: mol_type = other DNA
aactcaaaaaattactaaaactacgataaacaaaattacctacgataacg

SEQ ID NO: 51059 - DNA, 50 bp, synthetic construct
  source 1..50: mol_type = other DNA
aaaaccaaaacaaaaactacaactaccccatactaaaaaacatttcaaca

SEQ ID NO: 51060 - DNA, 50 bp, synthetic construct
  source 1..50: mol_type = other DNA
aaaaccgaaacgaaaactacaactaccccatactaaaaaacatttcgacg

SEQ ID NO: 51061 - DNA, 50 bp, synthetic construct
  source 1..50: mol_type = other DNA
actccaccacatatacaaactcctaataaccactaataaaaaccaaaaca

SEQ ID NO: 51062 - DNA, 50 bp, synthetic construct
  source 1..50: mol_type = other DNA
actccaccgcatatacaaactcctaataaccactaataaaaaccgaaacg

SEQ ID NO: 51063 - DNA, 50 bp, synthetic construct
  source 1..50: mol_type = other DNA
accctactccaccacatatacaaactcctaataaccactaataaaaacca

SEQ ID NO: 51064 - DNA, 50 bp, synthetic construct
  source 1..50: mol_type = other DNA
accctactccaccgcatatacaaactcctaataaccactaataaaaaccg

SEQ ID NO: 51065 - DNA, 50 bp, synthetic construct
  source 1..50: mol_type = other DNA
tcaataacaacacatcataaacaaatcccatacaacctcatcaactacca

SEQ ID NO: 51066 - DNA, 50 bp, synthetic construct
  source 1..50: mol_type = other DNA
tcgataacaacacatcgtaaacaaatcccatacaacctcatcgactaccg

SEQ ID NO: 51067 - DNA, 50 bp, synthetic construct
  source 1..50: mol_type = other DNA
taataacaaaaccatatcaattcttccaccaaatcccacctatttccaca

SEQ ID NO: 51068 - DNA, 50 bp, synthetic construct
  source 1..50: mol_type = other DNA
taataacgaaaccgtatcaattcttccaccaaatcccacctatttccacg

SEQ ID NO: 51069 - DNA, 50 bp, synthetic construct
  source 1..50: mol_type = other DNA
atcaaaacaaaacaaataaaaaatctcccaaaccaaattttctaaacaca

SEQ ID NO: 51070 - DNA, 50 bp, synthetic construct
  source 1..50: mol_type = other DNA
atcgaaacaaaacgaataaaaaatctcccaaaccaaattttctaaacacg

SEQ ID NO: 51071 - DNA, 50 bp, synthetic construct
  source 1..50: mol_type = other DNA
taacaattaaatcaattctctaaaactacaaataaaaaaacactatccca

SEQ ID NO: 51072 - DNA, 50 bp, synthetic construct
  source 1..50: mol_type = other DNA
taacaattaaatcaattctctaaaactacgaataaaaaaacgctatcccg

SEQ ID NO: 51073 - DNA, 50 bp, synthetic construct
  source 1..50: mol_type = other DNA
aaaaacaacaaaaaaaataccaaacaaccacaacaaaaatacacaaacca

SEQ ID NO: 51074 - DNA, 50 bp, synthetic construct
  source 1..50: mol_type = other DNA
aaaaacgacaaaaaaaataccaaacgaccgcaacaaaaatacacgaaccg

SEQ ID NO: 51075 - DNA, 50 bp, synthetic construct
  source 1..50: mol_type = other DNA
tacaacaacaactcataaaatcacctaacttaactacccaacctactaca

SEQ ID NO: 51076 - DNA, 50 bp, synthetic construct
  source 1..50: mol_type = other DNA
tacaacgacaactcataaaatcacctaacttaactacccgacctactacg

SEQ ID NO: 51077 - DNA, 50 bp, synthetic construct
  source 1..50: mol_type = other DNA
aaaaatccaaacaccctcctaacaaaaaaacaaacaaaacaaaaacatca

SEQ ID NO: 51078 - DNA, 50 bp, synthetic construct
  source 1..50: mol_type = other DNA
aaaaatccgaacaccctcctaacaaaaaaacgaacaaaacaaaaacatcg

SEQ ID NO: 51079 - DNA, 50 bp, synthetic construct
  source 1..50: mol_type = other DNA
actaaaaacactaacttccctctctaactataaaaaaaacaaatacccca

SEQ ID NO: 51080 - DNA, 50 bp, synthetic construct
  source 1..50: mol_type = other DNA
actaaaaacgctaacttccctctctaactataaaaaaaacgaataccccg

SEQ ID NO: 51081 - DNA, 50 bp, synthetic construct
  source 1..50: mol_type = other DNA
actccatctcataacataattcaaaacctcctttcactactctacaaaca

SEQ ID NO: 51082 - DNA, 50 bp, synthetic construct
  source 1..50: mol_type = other DNA
gctccatctcgtaacataattcaaaacctcctttcactactctacaaacg

SEQ ID NO: 51083 - DNA, 50 bp, synthetic construct
  source 1..50: mol_type = other DNA
aataatctataaaacacacacatcttcataacactaatcaaccttaacca

SEQ ID NO: 51084 - DNA, 50 bp, synthetic construct
  source 1..50: mol_type = other DNA
aataatctataaaacgcgcacatcttcataacactaatcgaccttaaccg

SEQ ID NO: 51085 - DNA, 50 bp, synthetic construct
  source 1..50: mol_type = other DNA
accacatccaccaacaacaaaaaaatccaaaatctcaaatcaaaaaacca

SEQ ID NO: 51086 - DNA, 50 bp, synthetic construct
  source 1..50: mol_type = other DNA
accgcgtccaccaacaacaaaaaaatccaaaatctcaaatcaaaaaaccg

SEQ ID NO: 51087 - DNA, 50 bp, synthetic construct
  source 1..50: mol_type = other DNA
caaaaaaataacctacaacaaaaaatcccaaacccaacacaaaactttca

SEQ ID NO: 51088 - DNA, 50 bp, synthetic construct
  source 1..50: mol_type = other DNA
cgaaaaaataacctacaacgaaaaatcccaaacccaacacgaaactttcg

SEQ ID NO: 51089 - DNA, 50 bp, synthetic construct
  source 1..50: mol_type = other DNA
ccaacccaaacctaaacatctacaattttaacaactaaaacaaaaacaca

SEQ ID NO: 51090 - DNA, 50 bp, synthetic construct
  source 1..50: mol_type = other DNA
ccaacccaaacctaaacgtctacaattttaacaactaaaacgaaaacacg

SEQ ID NO: 51091 - DNA, 50 bp, synthetic construct
  source 1..50: mol_type = other DNA
aaataccacatcaccattaactaatactaaaaccaaaacaaaacactaca

SEQ ID NO: 51092 - DNA, 50 bp, synthetic construct
  source 1..50: mol_type = other DNA
aaataccgcgtcaccattaactaatactaaaaccgaaacgaaacgctacg

SEQ ID NO: 51093 - DNA, 50 bp, synthetic construct
  source 1..50: mol_type = other DNA
actataaataccacatcaccattaactaatactaaaaccaaaacaaaaca

SEQ ID NO: 51094 - DNA, 50 bp, synthetic construct
  source 1..50: mol_type = other DNA
actataaataccgcgtcaccattaactaatactaaaaccgaaacgaaacg

SEQ ID NO: 51095 - DNA, 50 bp, synthetic construct
  source 1..50: mol_type = other DNA
ataaaaacaaaaaactcaaactaattaaacaaaaaactataaataccaca

SEQ ID NO: 51096 - DNA, 50 bp, synthetic construct
  source 1..50: mol_type = other DNA
ataaaaacgaaaaactcaaactaattaaacgaaaaactataaataccgcg

SEQ ID NO: 51097 - DNA, 50 bp, synthetic construct
  source 1..50: mol_type = other DNA
caaataaaaacaaacccaaataacaaatttaactacacaaaaaccacaca

SEQ ID NO: 51098 - DNA, 50 bp, synthetic construct
  source 1..50: mol_type = other DNA
caaataaaaacgaacccaaataacaaatttaactacgcgaaaaccgcgcg

SEQ ID NO: 51099 - DNA, 50 bp, synthetic construct
  source 1..50: mol_type = other DNA
ataaaaacaaacccaaataacaaatttaactacacaaaaaccacacatca

SEQ ID NO: 51100 - DNA, 50 bp, synthetic construct
  source 1..50: mol_type = other DNA
ataaaaacgaacccaaataacaaatttaactacgcgaaaaccgcgcgtcg

SEQ ID NO: 51101 - DNA, 50 bp, synthetic construct
  source 1..50: mol_type = other DNA
aacaaatttaactacacaaaaaccacacatcaaaaataaatactaaaaca

SEQ ID NO: 51102 - DNA, 50 bp, synthetic construct
  source 1..50: mol_type = other DNA
aacaaatttaactacgcgaaaaccgcgcgtcgaaaataaatactaaaacg

SEQ ID NO: 51103 - DNA, 50 bp, synthetic construct
  source 1..50: mol_type = other DNA
cacacatcaaaaataaatactaaaacaataaatataaaaaaccaaaacca

SEQ ID NO: 51104 - DNA, 50 bp, synthetic construct
  source 1..50: mol_type = other DNA
cgcgcgtcgaaaataaatactaaaacgataaatataaaaaaccgaaaccg

SEQ ID NO: 51105 - DNA, 50 bp, synthetic construct
  source 1..50: mol_type = other DNA
atcaaaaataaatactaaaacaataaatataaaaaaccaaaaccaaccca

SEQ ID NO: 51106 - DNA, 50 bp, synthetic construct
  source 1..50: mol_type = other DNA
gtcgaaaataaatactaaaacgataaatataaaaaaccgaaaccgacccg

SEQ ID NO: 51107 - DNA, 50 bp, synthetic construct
  source 1..50: mol_type = other DNA
aaataaatactaaaacaataaatataaaaaaccaaaaccaacccaaaaca

SEQ ID NO: 51108 - DNA, 50 bp, synthetic construct
  source 1..50: mol_type = other DNA
aaataaatactaaaacgataaatataaaaaaccgaaaccgacccgaaacg

SEQ ID NO: 51109 - DNA, 50 bp, synthetic construct
  source 1..50: mol_type = other DNA
ataaatactaaaacaataaatataaaaaaccaaaaccaacccaaaacaca

SEQ ID NO: 51110 - DNA, 50 bp, synthetic construct
  source 1..50: mol_type = other DNA
ataaatactaaaacgataaatataaaaaaccgaaaccgacccgaaacgcg

SEQ ID NO: 51111 - DNA, 50 bp, synthetic construct
  source 1..50: mol_type = other DNA
caataaatataaaaaaccaaaaccaacccaaaacacaaactaaaaaacca

SEQ ID NO: 51112 - DNA, 50 bp, synthetic construct
  source 1..50: mol_type = other DNA
cgataaatataaaaaaccgaaaccgacccgaaacgcgaactaaaaaaccg

SEQ ID NO: 51113 - DNA, 50 bp, synthetic construct
  source 1..50: mol_type = other DNA
aaaactattattttattaaaaaactatatcttatacttcctaaaatcaca

SEQ ID NO: 51114 - DNA, 50 bp, synthetic construct
  source 1..50: mol_type = other DNA
aaaactattattttattaaaaaactatatcttatacttcctaaaatcgcg

SEQ ID NO: 51115 - DNA, 50 bp, synthetic construct
  source 1..50: mol_type = other DNA
ctctccctaaaacttccaaaccaataattcccatacttatctacacaaca

SEQ ID NO: 51116 - DNA, 50 bp, synthetic construct
  source 1..50: mol_type = other DNA
ctctccctaaaacttccaaaccaataattcccatacttatctacacgacg

SEQ ID NO: 51117 - DNA, 50 bp, synthetic construct
  source 1..50: mol_type = other DNA
aaccactaacctaaaaaccccaaaaaaaaacctctaaaacccaaaacaca

SEQ ID NO: 51118 - DNA, 50 bp, synthetic construct
  source 1..50: mol_type = other DNA
aaccactaacctaaaaaccccaaaaaaaaacctctaaaacccgaaacacg

SEQ ID NO: 51119 - DNA, 50 bp, synthetic construct
  source 1..50: mol_type = other DNA
tctaaaaccaccctaaaaaaaacaaatataaatacaaaatataactaaca

SEQ ID NO: 51120 - DNA, 50 bp, synthetic construct
  source 1..50: mol_type = other DNA
tctaaaaccaccctaaaaaaaacaaatataaatacgaaatataactaacg

SEQ ID NO: 51121 - DNA, 50 bp, synthetic construct
  source 1..50: mol_type = other DNA
atcccaaatctaaaacaccaaacacaaacaaacaaaaactaaaaatcaca

SEQ ID NO: 51122 - DNA, 50 bp, synthetic construct
  source 1..50: mol_type = other DNA
atcccaaatctaaaacgccaaacacgaacgaacgaaaactaaaaatcgcg

SEQ ID NO: 51123 - DNA, 50 bp, synthetic construct
  source 1..50: mol_type = other DNA
aaaaactttattccacaataaccacctaacaaatacccctcctaccaaca

SEQ ID NO: 51124 - DNA, 50 bp, synthetic construct
  source 1..50: mol_type = other DNA
aaaaactttattccacgataaccacctaacaaatacccctcctaccgacg

SEQ ID NO: 51125 - DNA, 50 bp, synthetic construct
  source 1..50: mol_type = other DNA
aaacaccataatccaactaaaacataaacacctacactttccaaaaacca

SEQ ID NO: 51126 - DNA, 50 bp, synthetic construct
  source 1..50: mol_type = other DNA
aaacgccataatccaactaaaacgtaaacgcctacactttccgaaaaccg

SEQ ID NO: 51127 - DNA, 50 bp, synthetic construct
  source 1..50: mol_type = other DNA
aaacaaaacaaaacaaaaacctttaatcaaaacacccctcccaataaaca

SEQ ID NO: 51128 - DNA, 50 bp, synthetic construct
  source 1..50: mol_type = other DNA
aaacaaaacaaaacaaaaacctttaatcaaaacgcccctcccaataaacg

SEQ ID NO: 51129 - DNA, 50 bp, synthetic construct
  source 1..50: mol_type = other DNA
attaaaaacactaaaaacctcaaactccaaacccaactcctccaatacca

SEQ ID NO: 51130 - DNA, 50 bp, synthetic construct
  source 1..50: mol_type = other DNA
attaaaaacactaaaaacctcaaactccgaacccaactcctccaataccg

SEQ ID NO: 51131 - DNA, 50 bp, synthetic construct
  source 1..50: mol_type = other DNA
ataaataaaaaaacattaacctcaaaaactaactttccaaaaacaaaaca

SEQ ID NO: 51132 - DNA, 50 bp, synthetic construct
  source 1..50: mol_type = other DNA
ataaataaaaaaacattaacctcgaaaactaactttccgaaaacaaaacg

SEQ ID NO: 51133 - DNA, 50 bp, synthetic construct
  source 1..50: mol_type = other DNA
tgttttttatagagttgtttagaaattaaatgtaaatttgtttttttggt

SEQ ID NO: 51134 - DNA, 50 bp, synthetic construct
  source 1..50: mol_type = other DNA
tgttttttatagagttgtttagaaattaaacgtaaatttgtttttttggc

SEQ ID NO: 51135 - DNA, 50 bp, synthetic construct
  source 1..50: mol_type = other DNA
aaaactaaacccaataccaataacaatcactctataaaacctttcacaca

SEQ ID NO: 51136 - DNA, 50 bp, synthetic construct
  source 1..50: mol_type = other DNA
aaaactaaacccgataccaataacgatcgctctataaaacctttcgcacg

SEQ ID NO: 51137 - DNA, 50 bp, synthetic construct
  source 1..50: mol_type = other DNA
ctacaaaactaaacccaataccaataacaatcactctataaaacctttca

SEQ ID NO: 51138 - DNA, 50 bp, synthetic construct
  source 1..50: mol_type = other DNA
ctacaaaactaaacccgataccaataacgatcgctctataaaacctttcg

SEQ ID NO: 51139 - DNA, 50 bp, synthetic construct
  source 1..50: mol_type = other DNA
cccaccaccataaattccaaacttaaaataaataaacaacaaataaaaca

SEQ ID NO: 51140 - DNA, 50 bp, synthetic construct
  source 1..50: mol_type = other DNA
cccgccaccgtaaattccaaacttaaaataaataaacaacgaataaaacg

SEQ ID NO: 51141 - DNA, 50 bp, synthetic construct
  source 1..50: mol_type = other DNA
acccacctcaacctcccacaatactaaaataataaacctaaaccaccaca

SEQ ID NO: 51142 - DNA, 50 bp, synthetic construct
  source 1..50: mol_type = other DNA
acccacctcgacctcccacaatactaaaataataaacctaaaccaccgcg

SEQ ID NO: 51143 - DNA, 50 bp, synthetic construct
  source 1..50: mol_type = other DNA
aacaacaatttcaaaaaacaccataaaccaaaacaaaataacaaattcca

SEQ ID NO: 51144 - DNA, 50 bp, synthetic construct
  source 1..50: mol_type = other DNA
aacaacaatttcaaaaaacgccgtaaaccgaaacaaaataacgaattccg

SEQ ID NO: 51145 - DNA, 50 bp, synthetic construct
  source 1..50: mol_type = other DNA
aataaaaaacaacaatttcaaaaaacaccataaaccaaaacaaaataaca

SEQ ID NO: 51146 - DNA, 50 bp, synthetic construct
  source 1..50: mol_type = other DNA
aataaaaaacaacaatttcaaaaaacgccgtaaaccgaaacaaaataacg

SEQ ID NO: 51147 - DNA, 50 bp, synthetic construct
  source 1..50: mol_type = other DNA
ctaaccaataaccaataaactaaactcaaaccaaaaaataacaacaacca

SEQ ID NO: 51148 - DNA, 50 bp, synthetic construct
  source 1..50: mol_type = other DNA
ctaaccgataaccaataaactaaactcaaaccgaaaaataacaacgaccg

SEQ ID NO: 51149 - DNA, 50 bp, synthetic construct
  source 1..50: mol_type = other DNA
accaataaactaaactcaaaccaaaaaataacaacaaccaaaactaccca

SEQ ID NO: 51150 - DNA, 50 bp, synthetic construct
  source 1..50: mol_type = other DNA
accaataaactaaactcaaaccgaaaaataacaacgaccgaaactacccg

SEQ ID NO: 51151 - DNA, 50 bp, synthetic construct
  source 1..50: mol_type = other DNA
acccataactattcaccataaaaaaacaaaccacaacttctaaaataaca

SEQ ID NO: 51152 - DNA, 50 bp, synthetic construct
  source 1..50: mol_type = other DNA
acccgtaactattcgccataaaaaaacaaaccgcgacttctaaaataacg

SEQ ID NO: 51153 - DNA, 50 bp, synthetic construct
  source 1..50: mol_type = other DNA
tctactcaataactctaaataaccccaaaaaatacctcaaaccccaacca

SEQ ID NO: 51154 - DNA, 50 bp, synthetic construct
  source 1..50: mol_type = other DNA
tctactcgataactctaaataaccccaaaaaatacctcaaaccccaaccg

SEQ ID NO: 51155 - DNA, 50 bp, synthetic construct
  source 1..50: mol_type = other DNA
ctctaaataaccccaaaaaatacctcaaaccccaaccaactaaacaacca

SEQ ID NO: 51156 - DNA, 50 bp, synthetic construct
  source 1..50: mol_type = other DNA
ctctaaataaccccaaaaaatacctcaaaccccaaccgactaaacaaccg

SEQ ID NO: 51157 - DNA, 50 bp, synthetic construct
  source 1..50: mol_type = other DNA
aactaaccaaaaaaataaacaaaaccaccccaataaaaatactaaaacca

SEQ ID NO: 51158 - DNA, 50 bp, synthetic construct
  source 1..50: mol_type = other DNA
aactaaccgaaaaaataaacgaaaccaccccgataaaaatactaaaaccg

SEQ ID NO: 51159 - DNA, 50 bp, synthetic construct
  source 1..50: mol_type = other DNA
aattaccaaaataataaatcattcacttccccaccttccctaaacaacca

SEQ ID NO: 51160 - DNA, 50 bp, synthetic construct
  source 1..50: mol_type = other DNA
aattaccgaaataataaatcattcgcttccccaccttccctaaacgaccg

SEQ ID NO: 51161 - DNA, 50 bp, synthetic construct
  source 1..50: mol_type = other DNA
cccctaccaataaacctaaattataactaacaactacaaaaacacaaaca

SEQ ID NO: 51162 - DNA, 50 bp, synthetic construct
  source 1..50: mol_type = other DNA
cccctaccgataaacctaaattataactaacgactacgaaaacacgaacg

SEQ ID NO: 51163 - DNA, 50 bp, synthetic construct
  source 1..50: mol_type = other DNA
aaatccatcaacaaaaaaaacatcacaaaaaactaataaaatcacaaaca

SEQ ID NO: 51164 - DNA, 50 bp, synthetic construct
  source 1..50: mol_type = other DNA
aaatccatcgacaaaaaaaacgtcgcaaaaaactaataaaatcgcaaacg

SEQ ID NO: 51165 - DNA, 50 bp, synthetic construct
  source 1..50: mol_type = other DNA
caccataaaaccaaacctatctataaataaacatccatacttaccaacca

SEQ ID NO: 51166 - DNA, 50 bp, synthetic construct
  source 1..50: mol_type = other DNA
caccgtaaaaccgaacctatctataaataaacatccgtacttaccgaccg

SEQ ID NO: 51167 - DNA, 50 bp, synthetic construct
  source 1..50: mol_type = other DNA
aacacaccataaaaccaaacctatctataaataaacatccatacttacca

SEQ ID NO: 51168 - DNA, 50 bp, synthetic construct
  source 1..50: mol_type = other DNA
aacacaccgtaaaaccgaacctatctataaataaacatccgtacttaccg

SEQ ID NO: 51169 - DNA, 50 bp, synthetic construct
  source 1..50: mol_type = other DNA
acacccccaccaccaacacacattaaattcaaaacacaaatcccaataca

SEQ ID NO: 51170 - DNA, 50 bp, synthetic construct
  source 1..50: mol_type = other DNA
acacccccaccaccaacacacattaaattcaaaacacaaatcccaatacg

SEQ ID NO: 51171 - DNA, 50 bp, synthetic construct
  source 1..50: mol_type = other DNA
taacaaataatatttcttaacacttttcactaccactaaaccacaatcca

SEQ ID NO: 51172 - DNA, 50 bp, synthetic construct
  source 1..50: mol_type = other DNA
taacgaataatatttcttaacacttttcgctaccgctaaaccacgatccg

SEQ ID NO: 51173 - DNA, 50 bp, synthetic construct
  source 1..50: mol_type = other DNA
ttctaatccacaataacctctctccctaatacccaactacattcattcca

SEQ ID NO: 51174 - DNA, 50 bp, synthetic construct
  source 1..50: mol_type = other DNA
ttctaatccacgataacctctctccctaatacccaactacattcattccg

SEQ ID NO: 51175 - DNA, 50 bp, synthetic construct
  source 1..50: mol_type = other DNA
acttcccaaaatcattaacccaatccaaacaaaacaactaaaacaaaaca

SEQ ID NO: 51176 - DNA, 50 bp, synthetic construct
  source 1..50: mol_type = other DNA
acttcccaaaatcgttaacccaatccgaacaaaacaactaaaacgaaacg

SEQ ID NO: 51177 - DNA, 50 bp, synthetic construct
  source 1..50: mol_type = other DNA
ccaaaacttcccaaaatcattaacccaatccaaacaaaacaactaaaaca

SEQ ID NO: 51178 - DNA, 50 bp, synthetic construct
  source 1..50: mol_type = other DNA
ccaaaacttcccaaaatcgttaacccaatccgaacaaaacaactaaaacg

SEQ ID NO: 51179 - DNA, 50 bp, synthetic construct
  source 1..50: mol_type = other DNA
cctattcaaactaaaccaacaattttaaaaaaccctaataacaaaaatca

SEQ ID NO: 51180 - DNA, 50 bp, synthetic construct
  source 1..50: mol_type = other DNA
cctattcgaactaaaccaacgattttaaaaaaccctaataacaaaaatcg

SEQ ID NO: 51181 - DNA, 50 bp, synthetic construct
  source 1..50: mol_type = other DNA
ttaattaaaacataatactaataacaccaaaatcacaaattcaaacccca

SEQ ID NO: 51182 - DNA, 50 bp, synthetic construct
  source 1..50: mol_type = other DNA
ttaattaaaacgtaatactaataacgccaaaatcgcgaattcgaaccccg

SEQ ID NO: 51183 - DNA, 50 bp, synthetic construct
  source 1..50: mol_type = other DNA
aaaattaataaccaattaactcaattaattaaaacataatactaataaca

SEQ ID NO: 51184 - DNA, 50 bp, synthetic construct
  source 1..50: mol_type = other DNA
aaaattaataaccgattaactcaattaattaaaacgtaatactaataacg

SEQ ID NO: 51185 - DNA, 50 bp, synthetic construct
  source 1..50: mol_type = other DNA
aacaataccctatattaaaatttaaaataaacccaaaaaattaataacca

SEQ ID NO: 51186 - DNA, 50 bp, synthetic construct
  source 1..50: mol_type = other DNA
aacaataccctatattaaaatttaaaataaacccgaaaaattaataaccg

SEQ ID NO: 51187 - DNA, 50 bp, synthetic construct
  source 1..50: mol_type = other DNA
cccttctataaacacacaataaaacacaattttaaaaatcacaataacca

SEQ ID NO: 51188 - DNA, 50 bp, synthetic construct
  source 1..50: mol_type = other DNA
cccttctataaacgcgcgataaaacgcgattttaaaaatcacgataaccg

SEQ ID NO: 51189 - DNA, 50 bp, synthetic construct
  source 1..50: mol_type = other DNA
acctctaaatacaaccattatactaaaacactaaactccatttccaccca

SEQ ID NO: 51190 - DNA, 50 bp, synthetic construct
  source 1..50: mol_type = other DNA
acctctaaatacaaccattatactaaaacgctaaactccatttccgcccg

SEQ ID NO: 51191 - DNA, 50 bp, synthetic construct
  source 1..50: mol_type = other DNA
aatacaaaaacaccaacactaccatctaacacaaatctacaaaataacca

SEQ ID NO: 51192 - DNA, 50 bp, synthetic construct
  source 1..50: mol_type = other DNA
aatacaaaaacaccgacgctaccgtctaacacaaatctacgaaataaccg

SEQ ID NO: 51193 - DNA, 50 bp, synthetic construct
  source 1..50: mol_type = other DNA
caccataaactaaacaaaatcatacaaacaaccacacattctcaactaca

SEQ ID NO: 51194 - DNA, 50 bp, synthetic construct
  source 1..50: mol_type = other DNA
caccataaactaaacaaaatcatacgaacaaccacacgttctcaactacg

SEQ ID NO: 51195 - DNA, 50 bp, synthetic construct
  source 1..50: mol_type = other DNA
gttgggttatatgtgattgttttgtggataattgaagagttgatggtatt

SEQ ID NO: 51196 - DNA, 50 bp, synthetic construct
  source 1..50: mol_type = other DNA
gttgggttatatgtgattgttttgtggataattgaagagttgatggtatc

SEQ ID NO: 51197 - DNA, 50 bp, synthetic construct
  source 1..50: mol_type = other DNA
ccaacatctacatcaaaacctaaatatcactaaaaaaaaacctaaaccca

SEQ ID NO: 51198 - DNA, 50 bp, synthetic construct
  source 1..50: mol_type = other DNA
ccaacatctacatcgaaacctaaatatcgctaaaaaaaaacctaaacccg

SEQ ID NO: 51199 - DNA, 50 bp, synthetic construct
  source 1..50: mol_type = other DNA
ttactccctacttaactaaacactacaaaatttcacacctctaaacccca

SEQ ID NO: 51200 - DNA, 50 bp, synthetic construct
  source 1..50: mol_type = other DNA
ttactccctacttaactaaacactacgaaatttcacgcctctaaaccccg

SEQ ID NO: 51201 - DNA, 50 bp, synthetic construct
  source 1..50: mol_type = other DNA
attaatttaaatgtttattaatgatagattggataaagaaaatgtggtat

SEQ ID NO: 51202 - DNA, 50 bp, synthetic construct
  source 1..50: mol_type = other DNA
attaatttaaatgtttattaatgatagattggataaagaaaatgtggtac

SEQ ID NO: 51203 - DNA, 50 bp, synthetic construct
  source 1..50: mol_type = other DNA
aaaccctccaaaactacaataattaaaataacatacctaaacaaatatca

SEQ ID NO: 51204 - DNA, 50 bp, synthetic construct
  source 1..50: mol_type = other DNA
aaaccctccgaaactacgataattaaaataacgtacctaaacgaatatcg

SEQ ID NO: 51205 - DNA, 50 bp, synthetic construct
  source 1..50: mol_type = other DNA
ctcatcccccaccaaaaaaaccctccaaaactacaataattaaaataaca

SEQ ID NO: 51206 - DNA, 50 bp, synthetic construct
  source 1..50: mol_type = other DNA
ctcatcccccaccaaaaaaaccctccgaaactacgataattaaaataacg

SEQ ID NO: 51207 - DNA, 50 bp, synthetic construct
  source 1..50: mol_type = other DNA
aattacaataaaccaaaatcataccattacactccaatataaactaaaca

SEQ ID NO: 51208 - DNA, 50 bp, synthetic construct
  source 1..50: mol_type = other DNA
aattacaataaaccaaaatcgtaccattacactccaatataaactaaacg

SEQ ID NO: 51209 - DNA, 50 bp, synthetic construct
  source 1..50: mol_type = other DNA
accccaaataaaaaaatatacaaaaacaccaaaactaaaactaaaatcca

SEQ ID NO: 51210 - DNA, 50 bp, synthetic construct
  source 1..50: mol_type = other DNA
accccaaataaaaaaatatacaaaaacgccgaaactaaaactaaaatccg

SEQ ID NO: 51211 - DNA, 50 bp, synthetic construct
  source 1..50: mol_type = other DNA
cacataatcatttaataatattactacacaaacactatataacattccca

SEQ ID NO: 51212 - DNA, 50 bp, synthetic construct
  source 1..50: mol_type = other DNA
cacgtaatcgtttaataatattactacgcaaacgctatataacgttcccg

SEQ ID NO: 51213 - DNA, 50 bp, synthetic construct
  source 1..50: mol_type = other DNA
cttaaaacacaatacaaataactcaacctcacaataacaaaacaaaaaca

SEQ ID NO: 51214 - DNA, 50 bp, synthetic construct
  source 1..50: mol_type = other DNA
cttaaaacacgatacgaataactcaacctcgcaataacaaaacgaaaacg

SEQ ID NO: 51215 - DNA, 50 bp, synthetic construct
  source 1..50: mol_type = other DNA
ctaacccttaaaacacaatacaaataactcaacctcacaataacaaaaca

SEQ ID NO: 51216 - DNA, 50 bp, synthetic construct
  source 1..50: mol_type = other DNA
ctaacccttaaaacacgatacgaataactcaacctcgcaataacaaaacg

SEQ ID NO: 51217 - DNA, 50 bp, synthetic construct
  source 1..50: mol_type = other DNA
aatacaaataaaaacaaaaaactccaaactaacccttaaaacacaataca

SEQ ID NO: 51218 - DNA, 50 bp, synthetic construct
  source 1..50: mol_type = other DNA
aatacgaataaaaacgaaaaactccgaactaacccttaaaacacgatacg

SEQ ID NO: 51219 - DNA, 50 bp, synthetic construct
  source 1..50: mol_type = other DNA
aatacaatacaaataaaaacaaaaaactccaaactaacccttaaaacaca

SEQ ID NO: 51220 - DNA, 50 bp, synthetic construct
  source 1..50: mol_type = other DNA
aatacaatacgaataaaaacgaaaaactccgaactaacccttaaaacacg

SEQ ID NO: 51221 - DNA, 50 bp, synthetic construct
  source 1..50: mol_type = other DNA
caaaaactctttaaaaaacctccaaaaaccaacaaaacaaaataactcca

SEQ ID NO: 51222 - DNA, 50 bp, synthetic construct
  source 1..50: mol_type = other DNA
cgaaaactctttaaaaaacctccgaaaaccaacaaaacgaaataactccg

SEQ ID NO: 51223 - DNA, 50 bp, synthetic construct
  source 1..50: mol_type = other DNA
aataaaaataactaaaactcctaaattcttccttcataaccacactttca

SEQ ID NO: 51224 - DNA, 50 bp, synthetic construct
  source 1..50: mol_type = other DNA
aataaaaataactaaaactcctaaattcttccttcataaccacgctttcg

SEQ ID NO: 51225 - DNA, 50 bp, synthetic construct
  source 1..50: mol_type = other DNA
caaaccaaaaaaccacaatactaaaaaaatccaaacaacatacccaatca

SEQ ID NO: 51226 - DNA, 50 bp, synthetic construct
  source 1..50: mol_type = other DNA
caaaccgaaaaaccgcaatactaaaaaaatccaaacaacgtacccaatcg

SEQ ID NO: 51227 - DNA, 50 bp, synthetic construct
  source 1..50: mol_type = other DNA
aaccaatcactaaaactcttccctaaattcccaaactcctctataatcca

SEQ ID NO: 51228 - DNA, 50 bp, synthetic construct
  source 1..50: mol_type = other DNA
aaccaatcactaaaactcttccctaaattcccgaactcctctataatccg

SEQ ID NO: 51229 - DNA, 50 bp, synthetic construct
  source 1..50: mol_type = other DNA
aaataccacatccaacaactttatccaccaaataataaaaaaactaaaca

SEQ ID NO: 51230 - DNA, 50 bp, synthetic construct
  source 1..50: mol_type = other DNA
gaataccacatccaacaactttatccgccaaataataaaaaaactaaacg

SEQ ID NO: 51231 - DNA, 50 bp, synthetic construct
  source 1..50: mol_type = other DNA
caatcaaataaaaacacatcctcaaataccacatccaacaactttatcca

SEQ ID NO: 51232 - DNA, 50 bp, synthetic construct
  source 1..50: mol_type = other DNA
cgatcaaataaaaacacgtcctcgaataccacatccaacaactttatccg

SEQ ID NO: 51233 - DNA, 50 bp, synthetic construct
  source 1..50: mol_type = other DNA
aaacaaccaaaaaccaaactaaataactaaaccaaatactaactacacca

SEQ ID NO: 51234 - DNA, 50 bp, synthetic construct
  source 1..50: mol_type = other DNA
aaacaaccgaaaaccgaactaaataactaaaccgaatactaactacgccg

SEQ ID NO: 51235 - DNA, 50 bp, synthetic construct
  source 1..50: mol_type = other DNA
cataaaaataaaacaaacaaaaccaaaaaacctttaattttccttactca

SEQ ID NO: 51236 - DNA, 50 bp, synthetic construct
  source 1..50: mol_type = other DNA
cgtaaaaataaaacgaacgaaaccgaaaaacctttaattttccttactcg

SEQ ID NO: 51237 - DNA, 50 bp, synthetic construct
  source 1..50: mol_type = other DNA
aaaataaaacaaacaaaaccaaaaaacctttaattttccttactcaacca

SEQ ID NO: 51238 - DNA, 50 bp, synthetic construct
  source 1..50: mol_type = other DNA
aaaataaaacgaacgaaaccgaaaaacctttaattttccttactcgaccg

SEQ ID NO: 51239 - DNA, 50 bp, synthetic construct
  source 1..50: mol_type = other DNA
ataaaacaaacaaaaccaaaaaacctttaattttccttactcaaccacca

SEQ ID NO: 51240 - DNA, 50 bp, synthetic construct
  source 1..50: mol_type = other DNA
ataaaacgaacgaaaccgaaaaacctttaattttccttactcgaccgccg

SEQ ID NO: 51241 - DNA, 50 bp, synthetic construct
  source 1..50: mol_type = other DNA
caaaccaaaactctcaccaaacaacaccctaattaacaaacaaacaaaca

SEQ ID NO: 51242 - DNA, 50 bp, synthetic construct
  source 1..50: mol_type = other DNA
caaaccgaaactctcaccaaacaacgccctaattaacgaacaaacaaacg

SEQ ID NO: 51243 - DNA, 50 bp, synthetic construct
  source 1..50: mol_type = other DNA
ttatttctcccaccaaaataacatcaaaccaaaactctcaccaaacaaca

SEQ ID NO: 51244 - DNA, 50 bp, synthetic construct
  source 1..50: mol_type = other DNA
ttatttctcccgccaaaataacgtcaaaccgaaactctcaccaaacaacg

SEQ ID NO: 51245 - DNA, 50 bp, synthetic construct
  source 1..50: mol_type = other DNA
tacaacacctacctatccaccaatcaaaacactatttaataaaaacttca

SEQ ID NO: 51246 - DNA, 50 bp, synthetic construct
  source 1..50: mol_type = other DNA
tacaacgcctacctatccgccaatcaaaacgctatttaataaaaacttcg

SEQ ID NO: 51247 - DNA, 50 bp, synthetic construct
  source 1..50: mol_type = other DNA
ctacctatccaccaatcaaaacactatttaataaaaacttcaacctaaca

SEQ ID NO: 51248 - DNA, 50 bp, synthetic construct
  source 1..50: mol_type = other DNA
ctacctatccgccaatcaaaacgctatttaataaaaacttcgacctaacg

SEQ ID NO: 51249 - DNA, 50 bp, synthetic construct
  source 1..50: mol_type = other DNA
tatttaataaaaacttcaacctaacatcactttaacaaaaaaaacaaaca

SEQ ID NO: 51250 - DNA, 50 bp, synthetic construct
  source 1..50: mol_type = other DNA
tatttaataaaaacttcgacctaacgtcactttaacgaaaaaaacaaacg

SEQ ID NO: 51251 - DNA, 50 bp, synthetic construct
  source 1..50: mol_type = other DNA
aaacttcaacctaacatcactttaacaaaaaaaacaaacatatataaaca

SEQ ID NO: 51252 - DNA, 50 bp, synthetic construct
  source 1..50: mol_type = other DNA
aaacttcgacctaacgtcactttaacgaaaaaaacaaacgtatataaacg

SEQ ID NO: 51253 - DNA, 50 bp, synthetic construct
  source 1..50: mol_type = other DNA
caaaaaacccaaaaatctaataaaatatttccatcaaaaaaacaccccca

SEQ ID NO: 51254 - DNA, 50 bp, synthetic construct
  source 1..50: mol_type = other DNA
caaaaaacccgaaaatctaataaaatatttccatcgaaaaaacgcccccg

SEQ ID NO: 51255 - DNA, 50 bp, synthetic construct
  source 1..50: mol_type = other DNA
acaaatctaacttctcctcaccttcaaaataaaaactcaaaaaaaaacca

SEQ ID NO: 51256 - DNA, 50 bp, synthetic construct
  source 1..50: mol_type = other DNA
acgaatctaacttctcctcgccttcaaaataaaaactcaaaaaaaaaccg

SEQ ID NO: 51257 - DNA, 50 bp, synthetic construct
  source 1..50: mol_type = other DNA
tatctcacaaattttaaaaaattccattaaaaaaaataacaacaacctca

SEQ ID NO: 51258 - DNA, 50 bp, synthetic construct
  source 1..50: mol_type = other DNA
tatctcgcgaattttaaaaaattccgttaaaaaaaataacgacgacctcg

SEQ ID NO: 51259 - DNA, 50 bp, synthetic construct
  source 1..50: mol_type = other DNA
accacaatttatctcacaaattttaaaaaattccattaaaaaaaataaca

SEQ ID NO: 51260 - DNA, 50 bp, synthetic construct
  source 1..50: mol_type = other DNA
accacgatttatctcgcgaattttaaaaaattccgttaaaaaaaataacg

SEQ ID NO: 51261 - DNA, 50 bp, synthetic construct
  source 1..50: mol_type = other DNA
ttcaataccctatcctcttcctctctctaacaaaaccacaatttatctca

SEQ ID NO: 51262 - DNA, 50 bp, synthetic construct
  source 1..50: mol_type = other DNA
ttcgataccctatcctcttcctctctctaacaaaaccacgatttatctcg

SEQ ID NO: 51263 - DNA, 50 bp, synthetic construct
  source 1..50: mol_type = other DNA
aaactacactaaaaaaaatctcacaaaaccaacacattaaccaatattca

SEQ ID NO: 51264 - DNA, 50 bp, synthetic construct
  source 1..50: mol_type = other DNA
aaactacgctaaaaaaaatctcgcgaaaccgacgcattaaccaatattcg

SEQ ID NO: 51265 - DNA, 50 bp, synthetic construct
  source 1..50: mol_type = other DNA
tttaaaacaaaatctcactctataacccatcctaaaatattaataacaca

SEQ ID NO: 51266 - DNA, 50 bp, synthetic construct
  source 1..50: mol_type = other DNA
tttaaaacgaaatctcgctctataacccatcctaaaatattaataacgcg

SEQ ID NO: 51267 - DNA, 50 bp, synthetic construct
  source 1..50: mol_type = other DNA
acaataaaccaaaatcacaccactaacactccaaaataaactacaaaaca

SEQ ID NO: 51268 - DNA, 50 bp, synthetic construct
  source 1..50: mol_type = other DNA
acaataaaccgaaatcgcgccactaacactccaaaataaactacaaaacg

SEQ ID NO: 51269 - DNA, 50 bp, synthetic construct
  source 1..50: mol_type = other DNA
tttgtgatgagtttttggagttttttgtttgagtaaagttttattgaaat

SEQ ID NO: 51270 - DNA, 50 bp, synthetic construct
  source 1..50: mol_type = other DNA
ttcgcgatgagttttcggagtttttcgtttgagtaaagttttattgaaac

SEQ ID NO: 51271 - DNA, 50 bp, synthetic construct
  source 1..50: mol_type = other DNA
ccatttcaataaaactttactcaaacaaaaaactccaaaaactcatcaca

SEQ ID NO: 51272 - DNA, 50 bp, synthetic construct
  source 1..50: mol_type = other DNA
ccgtttcaataaaactttactcaaacgaaaaactccgaaaactcatcgcg

SEQ ID NO: 51273 - DNA, 50 bp, synthetic construct
  source 1..50: mol_type = other DNA
ttactcaaacaaaaaactccaaaaactcatcacaaaactcaaataaaaca

SEQ ID NO: 51274 - DNA, 50 bp, synthetic construct
  source 1..50: mol_type = other DNA
ttactcaaacgaaaaactccgaaaactcatcgcgaaactcaaataaaacg

SEQ ID NO: 51275 - DNA, 50 bp, synthetic construct
  source 1..50: mol_type = other DNA
caaaaatcatcacaaaaatccaataacctctcacaatatttcatacttca

SEQ ID NO: 51276 - DNA, 50 bp, synthetic construct
  source 1..50: mol_type = other DNA
caaaaatcgtcgcgaaaatccaataacctctcgcgatatttcgtacttcg

SEQ ID NO: 51277 - DNA, 50 bp, synthetic construct
  source 1..50: mol_type = other DNA
aaaaaaaacaaacttaaacaactccccattatctcacaactccactacca

SEQ ID NO: 51278 - DNA, 50 bp, synthetic construct
  source 1..50: mol_type = other DNA
aaaaaaaacaaacttaaacaactccccgttatctcgcaactccactaccg

SEQ ID NO: 51279 - DNA, 50 bp, synthetic construct
  source 1..50: mol_type = other DNA
cattctcccttcaatctaatttaaaaaccatatcatcaaaaaaaatatca

SEQ ID NO: 51280 - DNA, 50 bp, synthetic construct
  source 1..50: mol_type = other DNA
cgttctcccttcgatctaatttaaaaaccatatcatcgaaaaaaatatcg

SEQ ID NO: 51281 - DNA, 50 bp, synthetic construct
  source 1..50: mol_type = other DNA
aactctaattccaacaccttctccaataacataaccttcaaactaaacca

SEQ ID NO: 51282 - DNA, 50 bp, synthetic construct
  source 1..50: mol_type = other DNA
aactctaattccgacaccttctccgataacataaccttcaaactaaaccg

SEQ ID NO: 51283 - DNA, 50 bp, synthetic construct
  source 1..50: mol_type = other DNA
aataacaatatttatacaaacaatcactccaatctaatccacaacattca

SEQ ID NO: 51284 - DNA, 50 bp, synthetic construct
  source 1..50: mol_type = other DNA
aataacgatatttatacaaacgatcgctccgatctaatccacgacgttcg

SEQ ID NO: 51285 - DNA, 50 bp, synthetic construct
  source 1..50: mol_type = other DNA
taataataacaatatttatacaaacaatcactccaatctaatccacaaca

SEQ ID NO: 51286 - DNA, 50 bp, synthetic construct
  source 1..50: mol_type = other DNA
taataataacgatatttatacaaacgatcgctccgatctaatccacgacg

SEQ ID NO: 51287 - DNA, 50 bp, synthetic construct
  source 1..50: mol_type = other DNA
tactaataataacaatatttatacaaacaatcactccaatctaatccaca

SEQ ID NO: 51288 - DNA, 50 bp, synthetic construct
  source 1..50: mol_type = other DNA
tactaataataacgatatttatacaaacgatcgctccgatctaatccacg

SEQ ID NO: 51289 - DNA, 50 bp, synthetic construct
  source 1..50: mol_type = other DNA
aacaaaaaacaatcatccaactacaaaaaaaataactcttacaacaaaca

SEQ ID NO: 51290 - DNA, 50 bp, synthetic construct
  source 1..50: mol_type = other DNA
aacaaaaaacgatcgtccaactacgaaaaaaataactcttacaacgaacg

SEQ ID NO: 51291 - DNA, 50 bp, synthetic construct
  source 1..50: mol_type = other DNA
tacaaaaaaaataactcttacaacaaacaatcacccaatccctataatca

SEQ ID NO: 51292 - DNA, 50 bp, synthetic construct
  source 1..50: mol_type = other DNA
tacgaaaaaaataactcttacaacgaacgatcgcccaatccctataatcg

SEQ ID NO: 51293 - DNA, 50 bp, synthetic construct
  source 1..50: mol_type = other DNA
aataaactccaactcaaaaaccacttactcaaaaaaaaactactaaacca

SEQ ID NO: 51294 - DNA, 50 bp, synthetic construct
  source 1..50: mol_type = other DNA
aataaactccgactcaaaaaccgcttactcaaaaaaaaactactaaaccg

SEQ ID NO: 51295 - DNA, 50 bp, synthetic construct
  source 1..50: mol_type = other DNA
cacccaaaaaaaatcttaaaactacaataacctctttcccctccattaca

SEQ ID NO: 51296 - DNA, 50 bp, synthetic construct
  source 1..50: mol_type = other DNA
cgcccgaaaaaaatcttaaaactacaataacctctttcccctccattacg

SEQ ID NO: 51297 - DNA, 50 bp, synthetic construct
  source 1..50: mol_type = other DNA
ctttaaaatttctctcaaacatcccaattaccaaaacacaattaccaaca

SEQ ID NO: 51298 - DNA, 50 bp, synthetic construct
  source 1..50: mol_type = other DNA
ctttaaaatttctctcgaacgtcccgattaccaaaacgcgattaccaacg

SEQ ID NO: 51299 - DNA, 50 bp, synthetic construct
  source 1..50: mol_type = other DNA
actaaaaaacaaaaaccaataccaaatccaccaaacaattcaaaaaaaca

SEQ ID NO: 51300 - DNA, 50 bp, synthetic construct
  source 1..50: mol_type = other DNA
actaaaaaacgaaaaccgataccaaatccgccaaacgattcgaaaaaacg

SEQ ID NO: 51301 - DNA, 50 bp, synthetic construct
  source 1..50: mol_type = other DNA
acataacaaactacaacttcattatcctaattaattcctcctactcccca

SEQ ID NO: 51302 - DNA, 50 bp, synthetic construct
  source 1..50: mol_type = other DNA
acgtaacaaactacgacttcattatcctaattaattcctcctactccccg

SEQ ID NO: 51303 - DNA, 50 bp, synthetic construct
  source 1..50: mol_type = other DNA
ccaccctactataactaaccaaacaaaacaaaaataaaaaaccaacccca

SEQ ID NO: 51304 - DNA, 50 bp, synthetic construct
  source 1..50: mol_type = other DNA
ccaccctactataactaaccaaacaaaacgaaaataaaaaaccgaccccg

SEQ ID NO: 51305 - DNA, 50 bp, synthetic construct
  source 1..50: mol_type = other DNA
aaacaaaatatacacaacccaaaactaaaaccttaaaaaaacaccaacca

SEQ ID NO: 51306 - DNA, 50 bp, synthetic construct
  source 1..50: mol_type = other DNA
aaacaaaatatacgcgacccaaaactaaaaccttaaaaaaacaccgaccg

SEQ ID NO: 51307 - DNA, 50 bp, synthetic construct
  source 1..50: mol_type = other DNA
accaaaacaaaatatacacaacccaaaactaaaaccttaaaaaaacacca

SEQ ID NO: 51308 - DNA, 50 bp, synthetic construct
  source 1..50: mol_type = other DNA
accgaaacaaaatatacgcgacccaaaactaaaaccttaaaaaaacaccg

SEQ ID NO: 51309 - DNA, 50 bp, synthetic construct
  source 1..50: mol_type = other DNA
aacaaaacaatatccaatcaatactcttccaaaattccaactctaaacca

SEQ ID NO: 51310 - DNA, 50 bp, synthetic construct
  source 1..50: mol_type = other DNA
aacgaaacaatatccgatcgatactcttccaaaattccaactctaaaccg

SEQ ID NO: 51311 - DNA, 50 bp, synthetic construct
  source 1..50: mol_type = other DNA
ttcaaaaaacacaaaatctttactaaaaacaaaccaaaacaaaatataca

SEQ ID NO: 51312 - DNA, 50 bp, synthetic construct
  source 1..50: mol_type = other DNA
ttcaaaaaacgcaaaatctttactaaaaacgaaccgaaacaaaatatacg

SEQ ID NO: 51313 - DNA, 50 bp, synthetic construct
  source 1..50: mol_type = other DNA
ccatatcctcccaattcaaaaaacacaaaatctttactaaaaacaaacca

SEQ ID NO: 51314 - DNA, 50 bp, synthetic construct
  source 1..50: mol_type = other DNA
ccatatcctcccgattcaaaaaacgcaaaatctttactaaaaacgaaccg

SEQ ID NO: 51315 - DNA, 50 bp, synthetic construct
  source 1..50: mol_type = other DNA
aaaaatcaacataccacaataaacaactcctaaccttaacacctctacca

SEQ ID NO: 51316 - DNA, 50 bp, synthetic construct
  source 1..50: mol_type = other DNA
gaaaatcaacataccacaataaacaactcctaaccttaacgcctctaccg

SEQ ID NO: 51317 - DNA, 50 bp, synthetic construct
  source 1..50: mol_type = other DNA
aaaaaaccaaacttaaaaaaacaaatcaccccaactcaaaaataaaatca

SEQ ID NO: 51318 - DNA, 50 bp, synthetic construct
  source 1..50: mol_type = other DNA
aaaaaaccgaacttaaaaaaacgaatcgccccgactcgaaaataaaatcg

SEQ ID NO: 51319 - DNA, 50 bp, synthetic construct
  source 1..50: mol_type = other DNA
aaaccaaacttaaaaaaacaaatcaccccaactcaaaaataaaatcaaca

SEQ ID NO: 51320 - DNA, 50 bp, synthetic construct
  source 1..50: mol_type = other DNA
aaaccgaacttaaaaaaacgaatcgccccgactcgaaaataaaatcgacg

SEQ ID NO: 51321 - DNA, 50 bp, synthetic construct
  source 1..50: mol_type = other DNA
acacaaactatttccctaccacacaacaataacaccttaaaaaaacaaca

SEQ ID NO: 51322 - DNA, 50 bp, synthetic construct
  source 1..50: mol_type = other DNA
acacaaactatttccctaccacgcgacgataacaccttaaaaaaacaacg

SEQ ID NO: 51323 - DNA, 50 bp, synthetic construct
  source 1..50: mol_type = other DNA
aacaaaaccaaacaaaataaaactaacacaaactatttccctaccacaca

SEQ ID NO: 51324 - DNA, 50 bp, synthetic construct
  source 1..50: mol_type = other DNA
aacgaaaccgaacgaaataaaactaacacaaactatttccctaccacgcg

SEQ ID NO: 51325 - DNA, 50 bp, synthetic construct
  source 1..50: mol_type = other DNA
caaacaaaaccaaacaaaataaaactaacacaaactatttccctaccaca

SEQ ID NO: 51326 - DNA, 50 bp, synthetic construct
  source 1..50: mol_type = other DNA
cgaacgaaaccgaacgaaataaaactaacacaaactatttccctaccacg

SEQ ID NO: 51327 - DNA, 50 bp, synthetic construct
  source 1..50: mol_type = other DNA
aacacacacctaattattatacattatatttcttataacaaacaaaacca

SEQ ID NO: 51328 - DNA, 50 bp, synthetic construct
  source 1..50: mol_type = other DNA
aacgcgcgcctaattattatacattatatttcttataacgaacgaaaccg

SEQ ID NO: 51329 - DNA, 50 bp, synthetic construct
  source 1..50: mol_type = other DNA
actccaaacacacacctaattattatacattatatttcttataacaaaca

SEQ ID NO: 51330 - DNA, 50 bp, synthetic construct
  source 1..50: mol_type = other DNA
actccaaacgcgcgcctaattattatacattatatttcttataacgaacg

SEQ ID NO: 51331 - DNA, 50 bp, synthetic construct
  source 1..50: mol_type = other DNA
acaaacatataccaacttacaaaaaataaaaaactatatccacaactcca

SEQ ID NO: 51332 - DNA, 50 bp, synthetic construct
  source 1..50: mol_type = other DNA
acaaacgtataccaacttacaaaaaataaaaaactatatccacaactccg

SEQ ID NO: 51333 - DNA, 50 bp, synthetic construct
  source 1..50: mol_type = other DNA
acacaccttctattatcactataactcacaaaataaactctcctccccca

SEQ ID NO: 51334 - DNA, 50 bp, synthetic construct
  source 1..50: mol_type = other DNA
acacaccttctattatcactataactcacgaaataaactctcctcccccg

SEQ ID NO: 51335 - DNA, 50 bp, synthetic construct
  source 1..50: mol_type = other DNA
aaatcaaaaccctaacccttaattaaccaccaaccttccctatcaaaaca

SEQ ID NO: 51336 - DNA, 50 bp, synthetic construct
  source 1..50: mol_type = other DNA
aaatcaaaaccctaacccttaattaaccaccgaccttccctatcaaaacg

SEQ ID NO: 51337 - DNA, 50 bp, synthetic construct
  source 1..50: mol_type = other DNA
ctcaacaacaaaaataacactaccaaaaaatcttcttccactctaaaaca

SEQ ID NO: 51338 - DNA, 50 bp, synthetic construct
  source 1..50: mol_type = other DNA
ctcaacgacgaaaataacgctaccgaaaaatcttcttccgctctaaaacg

SEQ ID NO: 51339 - DNA, 50 bp, synthetic construct
  source 1..50: mol_type = other DNA
caaaaaaaaccaaaaccataactaacataaaacaaataaatcccaaaaca

SEQ ID NO: 51340 - DNA, 50 bp, synthetic construct
  source 1..50: mol_type = other DNA
cgaaaaaaaccgaaaccgtaactaacataaaacaaataaatcccgaaacg

SEQ ID NO: 51341 - DNA, 50 bp, synthetic construct
  source 1..50: mol_type = other DNA
aaaaaccaaaaccataactaacataaaacaaataaatcccaaaacaatca

SEQ ID NO: 51342 - DNA, 50 bp, synthetic construct
  source 1..50: mol_type = other DNA
aaaaaccgaaaccgtaactaacataaaacaaataaatcccgaaacgatcg

SEQ ID NO: 51343 - DNA, 50 bp, synthetic construct
  source 1..50: mol_type = other DNA
aaccataactaacataaaacaaataaatcccaaaacaatcactaaaaaca

SEQ ID NO: 51344 - DNA, 50 bp, synthetic construct
  source 1..50: mol_type = other DNA
aaccgtaactaacataaaacaaataaatcccgaaacgatcgctaaaaacg

SEQ ID NO: 51345 - DNA, 50 bp, synthetic construct
  source 1..50: mol_type = other DNA
acataaaacaaataaatcccaaaacaatcactaaaaacaaataacataca

SEQ ID NO: 51346 - DNA, 50 bp, synthetic construct
  source 1..50: mol_type = other DNA
acataaaacaaataaatcccgaaacgatcgctaaaaacgaataacgtacg

SEQ ID NO: 51347 - DNA, 50 bp, synthetic construct
  source 1..50: mol_type = other DNA
acaaataaatcccaaaacaatcactaaaaacaaataacatacaaaaacca

SEQ ID NO: 51348 - DNA, 50 bp, synthetic construct
  source 1..50: mol_type = other DNA
acaaataaatcccgaaacgatcgctaaaaacgaataacgtacgaaaaccg

SEQ ID NO: 51349 - DNA, 50 bp, synthetic construct
  source 1..50: mol_type = other DNA
atataaaaaaaatcaaacaaaacccaacacaaacaacaaacaacaaaaca

SEQ ID NO: 51350 - DNA, 50 bp, synthetic construct
  source 1..50: mol_type = other DNA
atataaaaaaaatcgaacgaaacccaacacgaacaacgaacgacgaaacg

SEQ ID NO: 51351 - DNA, 50 bp, synthetic construct
  source 1..50: mol_type = other DNA
aacaaatataaaaaaaatcaaacaaaacccaacacaaacaacaaacaaca

SEQ ID NO: 51352 - DNA, 50 bp, synthetic construct
  source 1..50: mol_type = other DNA
aacgaatataaaaaaaatcgaacgaaacccaacacgaacaacgaacgacg

SEQ ID NO: 51353 - DNA, 50 bp, synthetic construct
  source 1..50: mol_type = other DNA
ccaaaataaacaaaatcaccaaaaatcattactaaaaaccccaacccaca

SEQ ID NO: 51354 - DNA, 50 bp, synthetic construct
  source 1..50: mol_type = other DNA
ccaaaataaacgaaatcgccaaaaatcattactaaaaaccccaacccgcg

SEQ ID NO: 51355 - DNA, 50 bp, synthetic construct
  source 1..50: mol_type = other DNA
acaaacatcaaaaataacccttcacttctcaaacaacaaaaaaaaataca

SEQ ID NO: 51356 - DNA, 50 bp, synthetic construct
  source 1..50: mol_type = other DNA
acgaacatcaaaaataacccttcgcttctcaaacgacgaaaaaaaatacg

SEQ ID NO: 51357 - DNA, 50 bp, synthetic construct
  source 1..50: mol_type = other DNA
acaaaaaatacaacaaacatcaaaaataacccttcacttctcaaacaaca

SEQ ID NO: 51358 - DNA, 50 bp, synthetic construct
  source 1..50: mol_type = other DNA
acaaaaaatacgacgaacatcaaaaataacccttcgcttctcaaacgacg

SEQ ID NO: 51359 - DNA, 50 bp, synthetic construct
  source 1..50: mol_type = other DNA
taactcaaaacaccaaaaacaaaaaatatatatacaaacaaacatataca

SEQ ID NO: 51360 - DNA, 50 bp, synthetic construct
  source 1..50: mol_type = other DNA
taactcaaaacaccgaaaacaaaaaatatatatacgaacaaacatatacg

SEQ ID NO: 51361 - DNA, 50 bp, synthetic construct
  source 1..50: mol_type = other DNA
aaataaaaaccaaacacacaacacaataaaaaaccccataaaaaaaaaca

SEQ ID NO: 51362 - DNA, 50 bp, synthetic construct
  source 1..50: mol_type = other DNA
aaataaaaaccgaacgcgcgacgcaataaaaaaccccgtaaaaaaaaacg

SEQ ID NO: 51363 - DNA, 50 bp, synthetic construct
  source 1..50: mol_type = other DNA
ctaaaaaaacacaaaacacaaaatactacaaaaaataaaaaccaaacaca

SEQ ID NO: 51364 - DNA, 50 bp, synthetic construct
  source 1..50: mol_type = other DNA
ctaaaaaaacgcgaaacgcgaaatactacgaaaaataaaaaccgaacgcg

SEQ ID NO: 51365 - DNA, 50 bp, synthetic construct
  source 1..50: mol_type = other DNA
aaaaaacccaaacaaactctcctatcccaaaattataaacaatcaaaaca

SEQ ID NO: 51366 - DNA, 50 bp, synthetic construct
  source 1..50: mol_type = other DNA
aaaaaacccgaacgaactctcctatcccgaaattataaacaatcgaaacg

SEQ ID NO: 51367 - DNA, 50 bp, synthetic construct
  source 1..50: mol_type = other DNA
aaactctcctatcccaaaattataaacaatcaaaacactcaaaacaacca

SEQ ID NO: 51368 - DNA, 50 bp, synthetic construct
  source 1..50: mol_type = other DNA
gaactctcctatcccgaaattataaacaatcgaaacgctcaaaacaaccg

SEQ ID NO: 51369 - DNA, 50 bp, synthetic construct
  source 1..50: mol_type = other DNA
aaattataaacaatcaaaacactcaaaacaaccaaaccctaaaaccctca

SEQ ID NO: 51370 - DNA, 50 bp, synthetic construct
  source 1..50: mol_type = other DNA
aaattataaacaatcgaaacgctcaaaacaaccgaaccctaaaaccctcg

SEQ ID NO: 51371 - DNA, 50 bp, synthetic construct
  source 1..50: mol_type = other DNA
aatacacactaattctcccaataccaccaataaacaccacaaactctaca

SEQ ID NO: 51372 - DNA, 50 bp, synthetic construct
  source 1..50: mol_type = other DNA
aatacacactaattctcccaataccaccgataaacaccacaaactctacg

SEQ ID NO: 51373 - DNA, 50 bp, synthetic construct
  source 1..50: mol_type = other DNA
taacaaccacaactaatatcccttaaaaaaaactacaaaaaataaaatca

SEQ ID NO: 51374 - DNA, 50 bp, synthetic construct
  source 1..50: mol_type = other DNA
taacgaccacaactaatatcccttaaaaaaaactacaaaaaataaaatcg

SEQ ID NO: 51375 - DNA, 50 bp, synthetic construct
  source 1..50: mol_type = other DNA
acaaaataccaaccaccacaaaaataataaacatcaaaaaactaaaaaca

SEQ ID NO: 51376 - DNA, 50 bp, synthetic construct
  source 1..50: mol_type = other DNA
acaaaataccaaccaccgcaaaaataataaacgtcaaaaaactaaaaacg

SEQ ID NO: 51377 - DNA, 50 bp, synthetic construct
  source 1..50: mol_type = other DNA
ccccaaaaccacaaccaacaaaataccaaccaccacaaaaataataaaca

SEQ ID NO: 51378 - DNA, 50 bp, synthetic construct
  source 1..50: mol_type = other DNA
ccccaaaaccacgaccaacaaaataccaaccaccgcaaaaataataaacg

SEQ ID NO: 51379 - DNA, 50 bp, synthetic construct
  source 1..50: mol_type = other DNA
aaactaaaataaaataatacaatctcaactcaacctcccaaattaaaaca

SEQ ID NO: 51380 - DNA, 50 bp, synthetic construct
  source 1..50: mol_type = other DNA
aaactaaaataaaataatacgatctcaactcaacctcccaaattaaaacg

SEQ ID NO: 51381 - DNA, 50 bp, synthetic construct
  source 1..50: mol_type = other DNA
caatactataaaaaaacaatatccaaacatcaaaatcaaatcacacctca

SEQ ID NO: 51382 - DNA, 50 bp, synthetic construct
  source 1..50: mol_type = other DNA
caatactataaaaaaacaatatccgaacatcgaaatcgaatcgcgcctcg

SEQ ID NO: 51383 - DNA, 50 bp, synthetic construct
  source 1..50: mol_type = other DNA
ctaaccaatactataaaaaaacaatatccaaacatcaaaatcaaatcaca

SEQ ID NO: 51384 - DNA, 50 bp, synthetic construct
  source 1..50: mol_type = other DNA
ctaaccaatactataaaaaaacaatatccgaacatcgaaatcgaatcgcg

SEQ ID NO: 51385 - DNA, 50 bp, synthetic construct
  source 1..50: mol_type = other DNA
aaaaatcaaaaaataaaactaaactaaaaattcaaaaataaaacctccca

SEQ ID NO: 51386 - DNA, 50 bp, synthetic construct
  source 1..50: mol_type = other DNA
aaaaatcaaaaaataaaactaaactaaaaattcgaaaataaaacctcccg

SEQ ID NO: 51387 - DNA, 50 bp, synthetic construct
  source 1..50: mol_type = other DNA
ataaaatactaataaacaaccccaactaaaaaacccacaccctaatccca

SEQ ID NO: 51388 - DNA, 50 bp, synthetic construct
  source 1..50: mol_type = other DNA
ataaaatactaataaacgaccccgactaaaaaacccgcaccctaatcccg

SEQ ID NO: 51389 - DNA, 50 bp, synthetic construct
  source 1..50: mol_type = other DNA
aatccacatcataataaaatactaataaacaaccccaactaaaaaaccca

SEQ ID NO: 51390 - DNA, 50 bp, synthetic construct
  source 1..50: mol_type = other DNA
aatccgcatcgtaataaaatactaataaacgaccccgactaaaaaacccg

SEQ ID NO: 51391 - DNA, 50 bp, synthetic construct
  source 1..50: mol_type = other DNA
aaccaaacaataaaatccacatcataataaaatactaataaacaacccca

SEQ ID NO: 51392 - DNA, 50 bp, synthetic construct
  source 1..50: mol_type = other DNA
aaccgaacaataaaatccgcatcgtaataaaatactaataaacgaccccg

SEQ ID NO: 51393 - DNA, 50 bp, synthetic construct
  source 1..50: mol_type = other DNA
aaataaatacaaataaccatacctattaatcacaactatataaaaataca

SEQ ID NO: 51394 - DNA, 50 bp, synthetic construct
  source 1..50: mol_type = other DNA
aaataaatacgaataaccgtacctattaatcacaactatataaaaatacg

SEQ ID NO: 51395 - DNA, 50 bp, synthetic construct
  source 1..50: mol_type = other DNA
aaaaacaaaactcaaaacataaaaattaaacaaataaatacaaataacca

SEQ ID NO: 51396 - DNA, 50 bp, synthetic construct
  source 1..50: mol_type = other DNA
aaaaacaaaactcaaaacataaaaattaaacaaataaatacgaataaccg

SEQ ID NO: 51397 - DNA, 50 bp, synthetic construct
  source 1..50: mol_type = other DNA
acaattttcctacctcaacctcttaaataatttaaaattacaaacataca

SEQ ID NO: 51398 - DNA, 50 bp, synthetic construct
  source 1..50: mol_type = other DNA
acgattttcctacctcaacctcttaaataatttaaaattacaaacgtacg

SEQ ID NO: 51399 - DNA, 50 bp, synthetic construct
  source 1..50: mol_type = other DNA
cacacatacaacttaaataataacaaaaaaacaaacaacaaaacaaatca

SEQ ID NO: 51400 - DNA, 50 bp, synthetic construct
  source 1..50: mol_type = other DNA
cgcgcatacgacttaaataataacgaaaaaacgaacgacgaaacaaatcg

SEQ ID NO: 51401 - DNA, 50 bp, synthetic construct
  source 1..50: mol_type = other DNA
aaaaacacaaaaaaccaccacaacaaaaaataactcaataaaacctaaca

SEQ ID NO: 51402 - DNA, 50 bp, synthetic construct
  source 1..50: mol_type = other DNA
aaaaacacgaaaaaccgccacgacgaaaaataactcgataaaacctaacg

SEQ ID NO: 51403 - DNA, 50 bp, synthetic construct
  source 1..50: mol_type = other DNA
acaaaaataaaaaacaataaaacaccaaaactaaaccatcacactacaca

SEQ ID NO: 51404 - DNA, 50 bp, synthetic construct
  source 1..50: mol_type = other DNA
acgaaaataaaaaacgataaaacgccgaaactaaaccgtcgcgctacacg

SEQ ID NO: 51405 - DNA, 50 bp, synthetic construct
  source 1..50: mol_type = other DNA
tcaacacctacaaaaataaaaaacaataaaacaccaaaactaaaccatca

SEQ ID NO: 51406 - DNA, 50 bp, synthetic construct
  source 1..50: mol_type = other DNA
tcgacgcctacgaaaataaaaaacgataaaacgccgaaactaaaccgtcg

SEQ ID NO: 51407 - DNA, 50 bp, synthetic construct
  source 1..50: mol_type = other DNA
taaccaaaataaaaacctcaaaaaacaaaaaccccaaaaacctaaccaca

SEQ ID NO: 51408 - DNA, 50 bp, synthetic construct
  source 1..50: mol_type = other DNA
taaccgaaataaaaacctcgaaaaacaaaaaccccgaaaacctaaccgcg

SEQ ID NO: 51409 - DNA, 50 bp, synthetic construct
  source 1..50: mol_type = other DNA
aatcctacacaacaacaatacccaaaaaaacaaaacaaaatacaacaaca

SEQ ID NO: 51410 - DNA, 50 bp, synthetic construct
  source 1..50: mol_type = other DNA
aatcctacgcaacgacaatacccgaaaaaacgaaacgaaatacaacaacg

SEQ ID NO: 51411 - DNA, 50 bp, synthetic construct
  source 1..50: mol_type = other DNA
acaacccaaacaaaatccaaaaataaaactacccaaatcacaacccaaca

SEQ ID NO: 51412 - DNA, 50 bp, synthetic construct
  source 1..50: mol_type = other DNA
acaacccgaacaaaatccaaaaataaaactacccgaatcacaacccaacg

SEQ ID NO: 51413 - DNA, 50 bp, synthetic construct
  source 1..50: mol_type = other DNA
caacaacactaaactataacccaaacaatttcacttctaaatcctactca

SEQ ID NO: 51414 - DNA, 50 bp, synthetic construct
  source 1..50: mol_type = other DNA
caacgacgctaaactataacccgaacaatttcacttctaaatcctactcg

SEQ ID NO: 51415 - DNA, 50 bp, synthetic construct
  source 1..50: mol_type = other DNA
ccaaacaatttcacttctaaatcctactcaaactataataaaacaacaca

SEQ ID NO: 51416 - DNA, 50 bp, synthetic construct
  source 1..50: mol_type = other DNA
ccgaacaatttcacttctaaatcctactcgaactataataaaacaacgcg

SEQ ID NO: 51417 - DNA, 50 bp, synthetic construct
  source 1..50: mol_type = other DNA
aatcctactcaaactataataaaacaacacaaaaacaacaaaaaaacaca

SEQ ID NO: 51418 - DNA, 50 bp, synthetic construct
  source 1..50: mol_type = other DNA
aatcctactcgaactataataaaacaacgcgaaaacaacgaaaaaacacg

SEQ ID NO: 51419 - DNA, 50 bp, synthetic construct
  source 1..50: mol_type = other DNA
tcctactcaaactataataaaacaacacaaaaacaacaaaaaaacacaca

SEQ ID NO: 51420 - DNA, 50 bp, synthetic construct
  source 1..50: mol_type = other DNA
tcctactcgaactataataaaacaacgcgaaaacaacgaaaaaacacgcg

SEQ ID NO: 51421 - DNA, 50 bp, synthetic construct
  source 1..50: mol_type = other DNA
tcaaactataataaaacaacacaaaaacaacaaaaaaacacacaaacaca

SEQ ID NO: 51422 - DNA, 50 bp, synthetic construct
  source 1..50: mol_type = other DNA
tcgaactataataaaacaacgcgaaaacaacgaaaaaacacgcgaacacg

SEQ ID NO: 51423 - DNA, 50 bp, synthetic construct
  source 1..50: mol_type = other DNA
aactataataaaacaacacaaaaacaacaaaaaaacacacaaacacacca

SEQ ID NO: 51424 - DNA, 50 bp, synthetic construct
  source 1..50: mol_type = other DNA
aactataataaaacaacgcgaaaacaacgaaaaaacacgcgaacacgccg

SEQ ID NO: 51425 - DNA, 50 bp, synthetic construct
  source 1..50: mol_type = other DNA
aaaaacataaatcacataacaccccaaaaataaaaaacctcccctcatca

SEQ ID NO: 51426 - DNA, 50 bp, synthetic construct
  source 1..50: mol_type = other DNA
aaaaacgtaaatcgcgtaacaccccaaaaataaaaaacctcccctcatcg

SEQ ID NO: 51427 - DNA, 50 bp, synthetic construct
  source 1..50: mol_type = other DNA
aacactcaaaaccccaataaaaaaaaacctttcactcctaaaatatcaca

SEQ ID NO: 51428 - DNA, 50 bp, synthetic construct
  source 1..50: mol_type = other DNA
gacgctcgaaaccccgataaaaaaaaacctttcactcctaaaatatcacg

SEQ ID NO: 51429 - DNA, 50 bp, synthetic construct
  source 1..50: mol_type = other DNA
ttctcaaattctcctcttaattctacataaacccaaaccccaaattccca

SEQ ID NO: 51430 - DNA, 50 bp, synthetic construct
  source 1..50: mol_type = other DNA
ttctcaaattctcctcttaattctacgtaaacccaaaccccaaattcccg

SEQ ID NO: 51431 - DNA, 50 bp, synthetic construct
  source 1..50: mol_type = other DNA
attataaaaaactcaaaataacacacactaaaactaaatctaaaccccca

SEQ ID NO: 51432 - DNA, 50 bp, synthetic construct
  source 1..50: mol_type = other DNA
attataaaaaactcgaaataacgcgcgctaaaactaaatctaaacccccg

SEQ ID NO: 51433 - DNA, 50 bp, synthetic construct
  source 1..50: mol_type = other DNA
taattcaaattcacaccctacaataaaccattcaaaatacccaccattca

SEQ ID NO: 51434 - DNA, 50 bp, synthetic construct
  source 1..50: mol_type = other DNA
taattcgaattcacaccctacaataaaccattcgaaatacccaccattcg

SEQ ID NO: 51435 - DNA, 50 bp, synthetic construct
  source 1..50: mol_type = other DNA
taccataactcaaaaacaaaaaaatctaataattacaaattacatacaca

SEQ ID NO: 51436 - DNA, 50 bp, synthetic construct
  source 1..50: mol_type = other DNA
taccgtaactcaaaaacgaaaaaatctaataattacaaattacatacacg

SEQ ID NO: 51437 - DNA, 50 bp, synthetic construct
  source 1..50: mol_type = other DNA
caaaatactccctactaataattatcaccaacccacctaaaataacaaca

SEQ ID NO: 51438 - DNA, 50 bp, synthetic construct
  source 1..50: mol_type = other DNA
caaaatactccctactaataattatcgccaacccgcctaaaataacaacg

SEQ ID NO: 51439 - DNA, 50 bp, synthetic construct
  source 1..50: mol_type = other DNA
taaaaaaataatataaatctaaaaatctaaaacacaatcacattaaccca

SEQ ID NO: 51440 - DNA, 50 bp, synthetic construct
  source 1..50: mol_type = other DNA
taaaaaaataatataaatctaaaaatctaaaacacaatcgcattaacccg

SEQ ID NO: 51441 - DNA, 50 bp, synthetic construct
  source 1..50: mol_type = other DNA
tataatattttaataaaaaacaacacttccttttaaaacatatatttaca

SEQ ID NO: 51442 - DNA, 50 bp, synthetic construct
  source 1..50: mol_type = other DNA
tataatattttaataaaaaacgacacttccttttaaaacatatatttacg

SEQ ID NO: 51443 - DNA, 50 bp, synthetic construct
  source 1..50: mol_type = other DNA
tactaaacaataccacaaaaacctcaacaaatacctaaacaaaactaaca

SEQ ID NO: 51444 - DNA, 50 bp, synthetic construct
  source 1..50: mol_type = other DNA
tactaaacaataccgcgaaaacctcaacgaatacctaaacgaaactaacg

SEQ ID NO: 51445 - DNA, 50 bp, synthetic construct
  source 1..50: mol_type = other DNA
taaaattctaactaccttaacattcataacaaaaaaatcacttaaacaca

SEQ ID NO: 51446 - DNA, 50 bp, synthetic construct
  source 1..50: mol_type = other DNA
taaaattctaactaccttaacattcataacaaaaaaatcgcttaaacacg

SEQ ID NO: 51447 - DNA, 50 bp, synthetic construct
  source 1..50: mol_type = other DNA
aaaaaaaaaccacaatatcacattccaaaaattccccaatctaaaaacca

SEQ ID NO: 51448 - DNA, 50 bp, synthetic construct
  source 1..50: mol_type = other DNA
aaaaaaaaaccacgatatcgcgttccgaaaattccccaatctaaaaaccg

SEQ ID NO: 51449 - DNA, 50 bp, synthetic construct
  source 1..50: mol_type = other DNA
cccaacctcactttcttctctacaaactaaaacaatacctacaaaccaca

SEQ ID NO: 51450 - DNA, 50 bp, synthetic construct
  source 1..50: mol_type = other DNA
cccgacctcactttcttctctacaaactaaaacaatacctacaaaccacg

SEQ ID NO: 51451 - DNA, 50 bp, synthetic construct
  source 1..50: mol_type = other DNA
caacttaaccctaactcctacaaaaatataaaaaaactataacaaaaaca

SEQ ID NO: 51452 - DNA, 50 bp, synthetic construct
  source 1..50: mol_type = other DNA
caacttaaccctaactcctacgaaaatataaaaaaactataacaaaaacg

SEQ ID NO: 51453 - DNA, 50 bp, synthetic construct
  source 1..50: mol_type = other DNA
tctcctccacatcatactactaaacatcccatttataaatatccctatca

SEQ ID NO: 51454 - DNA, 50 bp, synthetic construct
  source 1..50: mol_type = other DNA
tctcctccacatcgtactactaaacatcccgtttataaatatccctatcg

SEQ ID NO: 51455 - DNA, 50 bp, synthetic construct
  source 1..50: mol_type = other DNA
attataaataaaattaataaaaatccaaacaacaaaaacactcacaaaca

SEQ ID NO: 51456 - DNA, 50 bp, synthetic construct
  source 1..50: mol_type = other DNA
attataaataaaattaataaaaatccaaacgacaaaaacactcacaaacg

SEQ ID NO: 51457 - DNA, 50 bp, synthetic construct
  source 1..50: mol_type = other DNA
aacaaaataaatataaacacaacacacaacaaaataaaccccaacacaca

SEQ ID NO: 51458 - DNA, 50 bp, synthetic construct
  source 1..50: mol_type = other DNA
aacaaaataaatataaacacaacgcacaacgaaataaaccccaacacgcg

SEQ ID NO: 51459 - DNA, 50 bp, synthetic construct
  source 1..50: mol_type = other DNA
caaaaaaacaaaatcctcactattattaaaattttctaaataaaacctca

SEQ ID NO: 51460 - DNA, 50 bp, synthetic construct
  source 1..50: mol_type = other DNA
cgaaaaaacgaaatcctcactattattaaaattttctaaataaaacctcg

SEQ ID NO: 51461 - DNA, 50 bp, synthetic construct
  source 1..50: mol_type = other DNA
acacataaaaataactataaaatcccaaaccaaaccaaattccaaataca

SEQ ID NO: 51462 - DNA, 50 bp, synthetic construct
  source 1..50: mol_type = other DNA
acgcgtaaaaataactataaaatcccgaaccgaaccgaattccgaatacg

SEQ ID NO: 51463 - DNA, 50 bp, synthetic construct
  source 1..50: mol_type = other DNA
caaaactaaataaacacataaaaataactataaaatcccaaaccaaacca

SEQ ID NO: 51464 - DNA, 50 bp, synthetic construct
  source 1..50: mol_type = other DNA
caaaactaaataaacgcgtaaaaataactataaaatcccgaaccgaaccg

SEQ ID NO: 51465 - DNA, 50 bp, synthetic construct
  source 1..50: mol_type = other DNA
acctccaaaactaaataaacacataaaaataactataaaatcccaaacca

SEQ ID NO: 51466 - DNA, 50 bp, synthetic construct
  source 1..50: mol_type = other DNA
acctccaaaactaaataaacgcgtaaaaataactataaaatcccgaaccg

SEQ ID NO: 51467 - DNA, 50 bp, synthetic construct
  source 1..50: mol_type = other DNA
ctcaacttcaaaaataaacatttaactacctccaaaactaaataaacaca

SEQ ID NO: 51468 - DNA, 50 bp, synthetic construct
  source 1..50: mol_type = other DNA
ctcgacttcgaaaataaacgtttaactacctccaaaactaaataaacgcg

SEQ ID NO: 51469 - DNA, 50 bp, synthetic construct
  source 1..50: mol_type = other DNA
aactcaacttcaaaaataaacatttaactacctccaaaactaaataaaca

SEQ ID NO: 51470 - DNA, 50 bp, synthetic construct
  source 1..50: mol_type = other DNA
gactcgacttcgaaaataaacgtttaactacctccaaaactaaataaacg

SEQ ID NO: 51471 - DNA, 50 bp, synthetic construct
  source 1..50: mol_type = other DNA
aaaacctcttaattccttccaaactcaccatataaaaccaaaaatcaaca

SEQ ID NO: 51472 - DNA, 50 bp, synthetic construct
  source 1..50: mol_type = other DNA
aaaacctcttaattccttccgaactcaccgtataaaaccgaaaatcaacg

SEQ ID NO: 51473 - DNA, 50 bp, synthetic construct
  source 1..50: mol_type = other DNA
aaaccaacaaaaaaaactacaactcccaaaaaacatcaaacataccaaca

SEQ ID NO: 51474 - DNA, 50 bp, synthetic construct
  source 1..50: mol_type = other DNA
aaaccaacgaaaaaaactacaactcccaaaaaacgtcgaacgtaccgacg

SEQ ID NO: 51475 - DNA, 50 bp, synthetic construct
  source 1..50: mol_type = other DNA
aaacccaaaaaaaactacaactcccaaaaaacatcaaaaaaaccaaccca

SEQ ID NO: 51476 - DNA, 50 bp, synthetic construct
  source 1..50: mol_type = other DNA
aaacccaaaaaaaactacaactcccaaaaaacgtcgaaaaaaccgacccg

SEQ ID NO: 51477 - DNA, 50 bp, synthetic construct
  source 1..50: mol_type = other DNA
aaacaaaacccaaaaaaaactacaactcccaaaaaacatcaaaaaaacca

SEQ ID NO: 51478 - DNA, 50 bp, synthetic construct
  source 1..50: mol_type = other DNA
aaacgaaacccaaaaaaaactacaactcccaaaaaacgtcgaaaaaaccg

SEQ ID NO: 51479 - DNA, 50 bp, synthetic construct
  source 1..50: mol_type = other DNA
aaattctatcatccaatctaaccatcacatcacaatacaacttccaacca

SEQ ID NO: 51480 - DNA, 50 bp, synthetic construct
  source 1..50: mol_type = other DNA
aaattctatcatccgatctaaccatcacgtcacgatacaacttccaaccg

SEQ ID NO: 51481 - DNA, 50 bp, synthetic construct
  source 1..50: mol_type = other DNA
aaattattacacaccaaaattctatcatccaatctaaccatcacatcaca

SEQ ID NO: 51482 - DNA, 50 bp, synthetic construct
  source 1..50: mol_type = other DNA
aaattattacgcaccaaaattctatcatccgatctaaccatcacgtcacg

SEQ ID NO: 51483 - DNA, 50 bp, synthetic construct
  source 1..50: mol_type = other DNA
aaaaaaacacttttcacaacattaactaaaataaaaatctaaaaaaccca

SEQ ID NO: 51484 - DNA, 50 bp, synthetic construct
  source 1..50: mol_type = other DNA
aaaaaaacgcttttcacaacattaactaaaataaaaatctaaaaaacccg

SEQ ID NO: 51485 - DNA, 50 bp, synthetic construct
  source 1..50: mol_type = other DNA
aataaaaaaatctataatacataacctcttctcacatcaaatacaaaaca

SEQ ID NO: 51486 - DNA, 50 bp, synthetic construct
  source 1..50: mol_type = other DNA
aataaaaaaatctataatacgtaacctcttctcacgtcaaatacgaaacg

SEQ ID NO: 51487 - DNA, 50 bp, synthetic construct
  source 1..50: mol_type = other DNA
tacaaaaaaacctaacccaaacaacaaatcacctacaaaaaaaataacca

SEQ ID NO: 51488 - DNA, 50 bp, synthetic construct
  source 1..50: mol_type = other DNA
tacgaaaaaacctaacccgaacgacaaatcgcctacgaaaaaaataaccg

SEQ ID NO: 51489 - DNA, 50 bp, synthetic construct
  source 1..50: mol_type = other DNA
cccaaacaacaaatcacctacaaaaaaaataaccaactaaaataaaaaca

SEQ ID NO: 51490 - DNA, 50 bp, synthetic construct
  source 1..50: mol_type = other DNA
cccgaacgacaaatcgcctacgaaaaaaataaccgactaaaataaaaacg

SEQ ID NO: 51491 - DNA, 50 bp, synthetic construct
  source 1..50: mol_type = other DNA
aacaaaattacaaactacaaaacaaaaataataataacatccaaaaaaca

SEQ ID NO: 51492 - DNA, 50 bp, synthetic construct
  source 1..50: mol_type = other DNA
aacgaaattacgaactacgaaacaaaaataataataacgtccgaaaaacg

SEQ ID NO: 51493 - DNA, 50 bp, synthetic construct
  source 1..50: mol_type = other DNA
aataacatccaaaaaacaaaactaaataaacaaccaaactacaaaaaaca

SEQ ID NO: 51494 - DNA, 50 bp, synthetic construct
  source 1..50: mol_type = other DNA
aataacgtccgaaaaacgaaactaaataaacgaccgaactacaaaaaacg

SEQ ID NO: 51495 - DNA, 50 bp, synthetic construct
  source 1..50: mol_type = other DNA
actaaacttaaaataacaaaaaacaaaacaaattacccaaaaacaaaaca

SEQ ID NO: 51496 - DNA, 50 bp, synthetic construct
  source 1..50: mol_type = other DNA
actaaacttaaaataacaaaaaacaaaacgaattacccaaaaacgaaacg

SEQ ID NO: 51497 - DNA, 50 bp, synthetic construct
  source 1..50: mol_type = other DNA
aacaaaactcaaatactaaaaaccaaacatacaccaaaaacccaaaccca

SEQ ID NO: 51498 - DNA, 50 bp, synthetic construct
  source 1..50: mol_type = other DNA
aacaaaactcaaatactaaaaaccaaacatacgccgaaaacccaaacccg

SEQ ID NO: 51499 - DNA, 50 bp, synthetic construct
  source 1..50: mol_type = other DNA
ttcccaaaaaacccaacaccaaaaaaaaatttacaactactccatcatca

SEQ ID NO: 51500 - DNA, 50 bp, synthetic construct
  source 1..50: mol_type = other DNA
ttcccaaaaaacccaacgccgaaaaaaaatttacaactactccgtcatcg

SEQ ID NO: 51501 - DNA, 50 bp, synthetic construct
  source 1..50: mol_type = other DNA
caaaataactatatccaactctcactaaaaatactcaaccactaccacca

SEQ ID NO: 51502 - DNA, 50 bp, synthetic construct
  source 1..50: mol_type = other DNA
caaaataactatatccaactctcgctaaaaatactcaaccgctaccgccg

SEQ ID NO: 51503 - DNA, 50 bp, synthetic construct
  source 1..50: mol_type = other DNA
caaaacaaactcaaaaaacatactattccctaccacctaaaaccctctca

SEQ ID NO: 51504 - DNA, 50 bp, synthetic construct
  source 1..50: mol_type = other DNA
caaaacgaactcaaaaaacatactattccctaccacctaaaaccctctcg

SEQ ID NO: 51505 - DNA, 50 bp, synthetic construct
  source 1..50: mol_type = other DNA
aataaaaaacaaccaaaacccctcctacccaacactaaaaaacaaaaaca

SEQ ID NO: 51506 - DNA, 50 bp, synthetic construct
  source 1..50: mol_type = other DNA
aataaaaaacaaccaaaacccctcctacccgacgctaaaaaacaaaaacg

SEQ ID NO: 51507 - DNA, 50 bp, synthetic construct
  source 1..50: mol_type = other DNA
actccaaactaacaataaaaacttctaaccctactttccaaaaaaccaca

SEQ ID NO: 51508 - DNA, 50 bp, synthetic construct
  source 1..50: mol_type = other DNA
actccgaactaacaataaaaacttctaaccctactttccgaaaaaccacg

SEQ ID NO: 51509 - DNA, 50 bp, synthetic construct
  source 1..50: mol_type = other DNA
ttgtttgtggttttttggaaagtagggttagaagtttttattgttagttt

SEQ ID NO: 51510 - DNA, 50 bp, synthetic construct
  source 1..50: mol_type = other DNA
ttgttcgtggtttttcggaaagtagggttagaagtttttattgttagttc

SEQ ID NO: 51511 - DNA, 50 bp, synthetic construct
  source 1..50: mol_type = other DNA
atcaccttctcaacctctacaaacaactaaatacaacaaataaaatccca

SEQ ID NO: 51512 - DNA, 50 bp, synthetic construct
  source 1..50: mol_type = other DNA
atcaccttctcaacctctacgaacaactaaatacaacgaataaaatcccg

SEQ ID NO: 51513 - DNA, 50 bp, synthetic construct
  source 1..50: mol_type = other DNA
tcacaacaaaacaaaaaaatacatcaaactataccaaacccttcttaaca

SEQ ID NO: 51514 - DNA, 50 bp, synthetic construct
  source 1..50: mol_type = other DNA
tcacgacaaaacaaaaaaatacatcgaactataccgaacccttcttaacg

SEQ ID NO: 51515 - DNA, 50 bp, synthetic construct
  source 1..50: mol_type = other DNA
aaaactaccatacaacacaacaaccaataaaaaacactaaaaaaaactca

SEQ ID NO: 51516 - DNA, 50 bp, synthetic construct
  source 1..50: mol_type = other DNA
aaaactaccgtacaacgcaacaaccaataaaaaacgctaaaaaaaactcg

SEQ ID NO: 51517 - DNA, 50 bp, synthetic construct
  source 1..50: mol_type = other DNA
tacaacacaacaaccaataaaaaacactaaaaaaaactcaacacaatcca

SEQ ID NO: 51518 - DNA, 50 bp, synthetic construct
  source 1..50: mol_type = other DNA
tacaacgcaacaaccaataaaaaacgctaaaaaaaactcgacacaatccg

SEQ ID NO: 51519 - DNA, 50 bp, synthetic construct
  source 1..50: mol_type = other DNA
aaaaatacaactcctaacacacaaaccaaaaccaactccaaattccaaca

SEQ ID NO: 51520 - DNA, 50 bp, synthetic construct
  source 1..50: mol_type = other DNA
aaaaatacaactcctaacacacaaaccgaaaccaactccgaattccaacg

SEQ ID NO: 51521 - DNA, 50 bp, synthetic construct
  source 1..50: mol_type = other DNA
aaaaaaacaaatccaaacaaaacaaaacaaaaacaaccaaaaaacaacca

SEQ ID NO: 51522 - DNA, 50 bp, synthetic construct
  source 1..50: mol_type = other DNA
aaaaaaacgaatccgaacgaaacgaaacaaaaacgaccgaaaaacgaccg

SEQ ID NO: 51523 - DNA, 50 bp, synthetic construct
  source 1..50: mol_type = other DNA
ctaaatatctcctaaaacaatacccaaaaccctataactctacacataca

SEQ ID NO: 51524 - DNA, 50 bp, synthetic construct
  source 1..50: mol_type = other DNA
ctaaatatctcctaaaacgatacccaaaaccctataactctacgcatacg

SEQ ID NO: 51525 - DNA, 50 bp, synthetic construct
  source 1..50: mol_type = other DNA
atatatctacacatatccatatatataccaaaaactcaactacattcaca

SEQ ID NO: 51526 - DNA, 50 bp, synthetic construct
  source 1..50: mol_type = other DNA
atatatctacacgtatccgtatatataccgaaaactcaactacattcacg

SEQ ID NO: 51527 - DNA, 50 bp, synthetic construct
  source 1..50: mol_type = other DNA
atatctacacatatccatatatataccaaaaactcaactacattcacaca

SEQ ID NO: 51528 - DNA, 50 bp, synthetic construct
  source 1..50: mol_type = other DNA
atatctacacgtatccgtatatataccgaaaactcaactacattcacgcg

SEQ ID NO: 51529 - DNA, 50 bp, synthetic construct
  source 1..50: mol_type = other DNA
ctaccaaaaaaaaatttctatccccaaaatctaacccccaatactaccca

SEQ ID NO: 51530 - DNA, 50 bp, synthetic construct
  source 1..50: mol_type = other DNA
ctaccaaaaaaaaatttctatccccaaaatctaacccccaatactacccg

SEQ ID NO: 51531 - DNA, 50 bp, synthetic construct
  source 1..50: mol_type = other DNA
aaaactacaaaataaaacaactcaacaataaaaacctaacaaaacaccca

SEQ ID NO: 51532 - DNA, 50 bp, synthetic construct
  source 1..50: mol_type = other DNA
aaaactacaaaataaaacgactcgacaataaaaacctaacgaaacgcccg

SEQ ID NO: 51533 - DNA, 50 bp, synthetic construct
  source 1..50: mol_type = other DNA
aaataaaacaactcaacaataaaaacctaacaaaacacccataaatacca

SEQ ID NO: 51534 - DNA, 50 bp, synthetic construct
  source 1..50: mol_type = other DNA
aaataaaacgactcgacaataaaaacctaacgaaacgcccgtaaataccg

SEQ ID NO: 51535 - DNA, 50 bp, synthetic construct
  source 1..50: mol_type = other DNA
cttatttacaaaaactaaaaaaatccactcaccaaccaaaaacccaaaca

SEQ ID NO: 51536 - DNA, 50 bp, synthetic construct
  source 1..50: mol_type = other DNA
cttatttacaaaaactaaaaaaatccactcgccaaccgaaaacccaaacg

SEQ ID NO: 51537 - DNA, 50 bp, synthetic construct
  source 1..50: mol_type = other DNA
taaaaaacataaaaaaaacctaacctttcaacctcataaaaaataaacca

SEQ ID NO: 51538 - DNA, 50 bp, synthetic construct
  source 1..50: mol_type = other DNA
taaaaaacgtaaaaaaaacctaacctttcaacctcataaaaaataaaccg

SEQ ID NO: 51539 - DNA, 50 bp, synthetic construct
  source 1..50: mol_type = other DNA
acccaaaaaatcaaaactacattaaacaataataacaccactacactcca

SEQ ID NO: 51540 - DNA, 50 bp, synthetic construct
  source 1..50: mol_type = other DNA
acccaaaaaatcaaaactacattaaacgataataacgccactacactccg

SEQ ID NO: 51541 - DNA, 50 bp, synthetic construct
  source 1..50: mol_type = other DNA
aactcctcccctaccatatatactcactcacacattcacacaaaaaaaca

SEQ ID NO: 51542 - DNA, 50 bp, synthetic construct
  source 1..50: mol_type = other DNA
aactcctcccctaccatatatactcactcacacattcacgcaaaaaaacg

SEQ ID NO: 51543 - DNA, 50 bp, synthetic construct
  source 1..50: mol_type = other DNA
ccctcccttccccctcaataatataaaatatatatatacattcctctaca

SEQ ID NO: 51544 - DNA, 50 bp, synthetic construct
  source 1..50: mol_type = other DNA
ccctcccttccccctcgataatataaaatatatatatacgttcctctacg

SEQ ID NO: 51545 - DNA, 50 bp, synthetic construct
  source 1..50: mol_type = other DNA
cccacttccacaacaaaaactaaaacaactaccactctaaaacaaataca

SEQ ID NO: 51546 - DNA, 50 bp, synthetic construct
  source 1..50: mol_type = other DNA
cccacttccacaacaaaaactaaaacaactaccgctctaaaacaaatacg

SEQ ID NO: 51547 - DNA, 50 bp, synthetic construct
  source 1..50: mol_type = other DNA
cactaaaacaaacaaaataaaacaacaaatacaatatcaataaaaaaaca

SEQ ID NO: 51548 - DNA, 50 bp, synthetic construct
  source 1..50: mol_type = other DNA
cactaaaacaaacaaaataaaacaacaaatacaatatcgataaaaaaacg

SEQ ID NO: 51549 - DNA, 50 bp, synthetic construct
  source 1..50: mol_type = other DNA
cccccacccaaaaattcccaaaacaaaaattactatcctccttataaaca

SEQ ID NO: 51550 - DNA, 50 bp, synthetic construct
  source 1..50: mol_type = other DNA
cccccgcccaaaaattcccaaaacaaaaattactatcctccttataaacg

SEQ ID NO: 51551 - DNA, 50 bp, synthetic construct
  source 1..50: mol_type = other DNA
actccaccaaaacaaaattctccatacccaaacaatctataaaaaaaaca

SEQ ID NO: 51552 - DNA, 50 bp, synthetic construct
  source 1..50: mol_type = other DNA
actccaccgaaacgaaattctccatacccgaacgatctataaaaaaaacg

SEQ ID NO: 51553 - DNA, 50 bp, synthetic construct
  source 1..50: mol_type = other DNA
aaattctccatacccaaacaatctataaaaaaaacaacaacaataaaaca

SEQ ID NO: 51554 - DNA, 50 bp, synthetic construct
  source 1..50: mol_type = other DNA
aaattctccatacccgaacgatctataaaaaaaacgacaacaataaaacg

SEQ ID NO: 51555 - DNA, 50 bp, synthetic construct
  source 1..50: mol_type = other DNA
atacccaaacaatctataaaaaaaacaacaacaataaaacaaactcccca

SEQ ID NO: 51556 - DNA, 50 bp, synthetic construct
  source 1..50: mol_type = other DNA
atacccgaacgatctataaaaaaaacgacaacaataaaacgaactccccg

SEQ ID NO: 51557 - DNA, 50 bp, synthetic construct
  source 1..50: mol_type = other DNA
actacctcaccatctcaaaacatacccacaaaaaaacacttcttaaaaca

SEQ ID NO: 51558 - DNA, 50 bp, synthetic construct
  source 1..50: mol_type = other DNA
actacctcaccgtctcgaaacatacccacaaaaaaacacttcttaaaacg

SEQ ID NO: 51559 - DNA, 50 bp, synthetic construct
  source 1..50: mol_type = other DNA
aaaaaacacttcttaaaacaacattactaacaacaattacaattaataca

SEQ ID NO: 51560 - DNA, 50 bp, synthetic construct
  source 1..50: mol_type = other DNA
aaaaaacacttcttaaaacgacattactaacaacgattacgattaatacg

SEQ ID NO: 51561 - DNA, 50 bp, synthetic construct
  source 1..50: mol_type = other DNA
aacacttcttaaaacaacattactaacaacaattacaattaatacaaaca

SEQ ID NO: 51562 - DNA, 50 bp, synthetic construct
  source 1..50: mol_type = other DNA
aacacttcttaaaacgacattactaacaacgattacgattaatacgaacg

SEQ ID NO: 51563 - DNA, 50 bp, synthetic construct
  source 1..50: mol_type = other DNA
tcaaacttccactacaatatacacacctacaaaaactacaaaataaaaca

SEQ ID NO: 51564 - DNA, 50 bp, synthetic construct
  source 1..50: mol_type = other DNA
tcgaacttccactacgatatacacgcctacgaaaactacaaaataaaacg

SEQ ID NO: 51565 - DNA, 50 bp, synthetic construct
  source 1..50: mol_type = other DNA
aatatataaaaacattacctcaaacttccactacaatatacacacctaca

SEQ ID NO: 51566 - DNA, 50 bp, synthetic construct
  source 1..50: mol_type = other DNA
aatatataaaaacgttacctcgaacttccactacgatatacacgcctacg

SEQ ID NO: 51567 - DNA, 50 bp, synthetic construct
  source 1..50: mol_type = other DNA
aatattactatataaaatatataaaaacattacctcaaacttccactaca

SEQ ID NO: 51568 - DNA, 50 bp, synthetic construct
  source 1..50: mol_type = other DNA
aatattactatataaaatatataaaaacgttacctcgaacttccactacg

SEQ ID NO: 51569 - DNA, 50 bp, synthetic construct
  source 1..50: mol_type = other DNA
aaaaaaaacaaacaaaaacaataaatcaacccaacttcacccaaatctca

SEQ ID NO: 51570 - DNA, 50 bp, synthetic construct
  source 1..50: mol_type = other DNA
aaaaaaaacaaacgaaaacgataaatcaacccaacttcacccaaatctcg

SEQ ID NO: 51571 - DNA, 50 bp, synthetic construct
  source 1..50: mol_type = other DNA
attaaaaaaccacatacaaaaaacacacataaaacaaaaacataaaacca

SEQ ID NO: 51572 - DNA, 50 bp, synthetic construct
  source 1..50: mol_type = other DNA
gttaaaaaaccacgtacgaaaaacacacgtaaaacaaaaacgtaaaaccg

SEQ ID NO: 51573 - DNA, 50 bp, synthetic construct
  source 1..50: mol_type = other DNA
aattcctcattaaaaaaccacatacaaaaaacacacataaaacaaaaaca

SEQ ID NO: 51574 - DNA, 50 bp, synthetic construct
  source 1..50: mol_type = other DNA
aattcctcgttaaaaaaccacgtacgaaaaacacacgtaaaacaaaaacg

SEQ ID NO: 51575 - DNA, 50 bp, synthetic construct
  source 1..50: mol_type = other DNA
cctcaaattccaaaattcctcattaaaaaaccacatacaaaaaacacaca

SEQ ID NO: 51576 - DNA, 50 bp, synthetic construct
  source 1..50: mol_type = other DNA
cctcgaattccgaaattcctcgttaaaaaaccacgtacgaaaaacacacg

SEQ ID NO: 51577 - DNA, 50 bp, synthetic construct
  source 1..50: mol_type = other DNA
aaaaaacaaaacctcaaattccaaaattcctcattaaaaaaccacataca

SEQ ID NO: 51578 - DNA, 50 bp, synthetic construct
  source 1..50: mol_type = other DNA
aaaaaacgaaacctcgaattccgaaattcctcgttaaaaaaccacgtacg

SEQ ID NO: 51579 - DNA, 50 bp, synthetic construct
  source 1..50: mol_type = other DNA
acaaaaaaaacaaaacctcaaattccaaaattcctcattaaaaaaccaca

SEQ ID NO: 51580 - DNA, 50 bp, synthetic construct
  source 1..50: mol_type = other DNA
acgaaaaaaacgaaacctcgaattccgaaattcctcgttaaaaaaccacg

SEQ ID NO: 51581 - DNA, 50 bp, synthetic construct
  source 1..50: mol_type = other DNA
aaaacacacattaccaaaacaaccaaaaaaacaaaactcattatataaca

SEQ ID NO: 51582 - DNA, 50 bp, synthetic construct
  source 1..50: mol_type = other DNA
aaaacacgcgttaccgaaacgaccgaaaaaacgaaactcattatataacg

SEQ ID NO: 51583 - DNA, 50 bp, synthetic construct
  source 1..50: mol_type = other DNA
aaatccaaaacataatacccaacccaaaaaaaaacacctacaaaactcca

SEQ ID NO: 51584 - DNA, 50 bp, synthetic construct
  source 1..50: mol_type = other DNA
aaatccaaaacgtaatacccgacccgaaaaaaaacacctacaaaactccg

SEQ ID NO: 51585 - DNA, 50 bp, synthetic construct
  source 1..50: mol_type = other DNA
taacaaaaaaaaacaacacttaaaaaatccaaaacataatacccaaccca

SEQ ID NO: 51586 - DNA, 50 bp, synthetic construct
  source 1..50: mol_type = other DNA
taacaaaaaaaaacgacacttaaaaaatccaaaacgtaatacccgacccg

SEQ ID NO: 51587 - DNA, 50 bp, synthetic construct
  source 1..50: mol_type = other DNA
tcctcaaatatcactccctcctatcactaaaaattccccaataaaatcca

SEQ ID NO: 51588 - DNA, 50 bp, synthetic construct
  source 1..50: mol_type = other DNA
tcctcaaatatcgctccctcctatcactaaaaattccccaataaaatccg

SEQ ID NO: 51589 - DNA, 50 bp, synthetic construct
  source 1..50: mol_type = other DNA
caaatatcactccctcctatcactaaaaattccccaataaaatccaaaca

SEQ ID NO: 51590 - DNA, 50 bp, synthetic construct
  source 1..50: mol_type = other DNA
caaatatcgctccctcctatcactaaaaattccccaataaaatccgaacg

SEQ ID NO: 51591 - DNA, 50 bp, synthetic construct
  source 1..50: mol_type = other DNA
aatattactaccaaaaaaacataacaaaacacacatctcacctctttaca

SEQ ID NO: 51592 - DNA, 50 bp, synthetic construct
  source 1..50: mol_type = other DNA
aatattactaccgaaaaaacgtaacaaaacacacgtctcgcctctttacg

SEQ ID NO: 51593 - DNA, 50 bp, synthetic construct
  source 1..50: mol_type = other DNA
aaattaacaaaataaaatattactaccaaaaaaacataacaaaacacaca

SEQ ID NO: 51594 - DNA, 50 bp, synthetic construct
  source 1..50: mol_type = other DNA
aaattaacaaaataaaatattactaccgaaaaaacgtaacaaaacacacg

SEQ ID NO: 51595 - DNA, 50 bp, synthetic construct
  source 1..50: mol_type = other DNA
aaaaaacaaaacaccaaatcacaaaaaaacaaaacatataccctactaca

SEQ ID NO: 51596 - DNA, 50 bp, synthetic construct
  source 1..50: mol_type = other DNA
aaaaaacgaaacaccgaatcgcaaaaaaacgaaacgtataccctactacg

SEQ ID NO: 51597 - DNA, 50 bp, synthetic construct
  source 1..50: mol_type = other DNA
atctcaaccaccttttacccaaacctttccctaaaacaaaaaactctaca

SEQ ID NO: 51598 - DNA, 50 bp, synthetic construct
  source 1..50: mol_type = other DNA
atctcaaccgccttttacccgaacctttccctaaaacaaaaaactctacg

SEQ ID NO: 51599 - DNA, 50 bp, synthetic construct
  source 1..50: mol_type = other DNA
cacaaaaactcaacataccaactattaaaaaaatatatcactaaaacaca

SEQ ID NO: 51600 - DNA, 50 bp, synthetic construct
  source 1..50: mol_type = other DNA
cgcaaaaactcaacgtaccgactattaaaaaaatatatcactaaaacacg

SEQ ID NO: 51601 - DNA, 50 bp, synthetic construct
  source 1..50: mol_type = other DNA
aaaacaaaatctcactctatcccccaaaccaaaatacaataacaatctca

SEQ ID NO: 51602 - DNA, 50 bp, synthetic construct
  source 1..50: mol_type = other DNA
aaaacaaaatctcactctatcccccaaaccgaaatacaataacgatctcg

SEQ ID NO: 51603 - DNA, 50 bp, synthetic construct
  source 1..50: mol_type = other DNA
attttaaaaacaaaatctcactctatcccccaaaccaaaatacaataaca

SEQ ID NO: 51604 - DNA, 50 bp, synthetic construct
  source 1..50: mol_type = other DNA
attttaaaaacaaaatctcactctatcccccaaaccgaaatacaataacg

SEQ ID NO: 51605 - DNA, 50 bp, synthetic construct
  source 1..50: mol_type = other DNA
cacataacccaaacatatacaacctactccatttctaccacaacaactca

SEQ ID NO: 51606 - DNA, 50 bp, synthetic construct
  source 1..50: mol_type = other DNA
cacataacccgaacatatacaacctactccatttctaccacaacaactcg

SEQ ID NO: 51607 - DNA, 50 bp, synthetic construct
  source 1..50: mol_type = other DNA
cataaacaacccaactactacaacaataacaataaaaacatatacaaaca

SEQ ID NO: 51608 - DNA, 50 bp, synthetic construct
  source 1..50: mol_type = other DNA
cataaacaacccgactactacgacgataacgataaaaacatatacaaacg

SEQ ID NO: 51609 - DNA, 50 bp, synthetic construct
  source 1..50: mol_type = other DNA
aacaataaaaacatatacaaacaaaaaaataaaacacataaccctaccca

SEQ ID NO: 51610 - DNA, 50 bp, synthetic construct
  source 1..50: mol_type = other DNA
aacgataaaaacatatacaaacgaaaaaataaaacacgtaaccctacccg

SEQ ID NO: 51611 - DNA, 50 bp, synthetic construct
  source 1..50: mol_type = other DNA
aacaaaaaaataaaacacataaccctacccaaaccaaaaaaaaacactca

SEQ ID NO: 51612 - DNA, 50 bp, synthetic construct
  source 1..50: mol_type = other DNA
aacgaaaaaataaaacacgtaaccctacccgaaccaaaaaaaaacgctcg

SEQ ID NO: 51613 - DNA, 50 bp, synthetic construct
  source 1..50: mol_type = other DNA
cattaaaaaaaaactattaataactaacaatacttcatcccaaaaaaaca

SEQ ID NO: 51614 - DNA, 50 bp, synthetic construct
  source 1..50: mol_type = other DNA
cgttaaaaaaaaactattaataactaacaatacttcatcccaaaaaaacg

SEQ ID NO: 51615 - DNA, 50 bp, synthetic construct
  source 1..50: mol_type = other DNA
actcaaaaaaaaacctaaatcctaactaatccaaaaaacatacaaaacca

SEQ ID NO: 51616 - DNA, 50 bp, synthetic construct
  source 1..50: mol_type = other DNA
actcaaaaaaaaacctaaatcctaactaatccaaaaaacgtacgaaaccg

SEQ ID NO: 51617 - DNA, 50 bp, synthetic construct
  source 1..50: mol_type = other DNA
tcaaaaaaaaacctaaatcctaactaatccaaaaaacatacaaaaccaca

SEQ ID NO: 51618 - DNA, 50 bp, synthetic construct
  source 1..50: mol_type = other DNA
tcaaaaaaaaacctaaatcctaactaatccaaaaaacgtacgaaaccgcg

SEQ ID NO: 51619 - DNA, 50 bp, synthetic construct
  source 1..50: mol_type = other DNA
aaaaaataaaaactcaaaacaattaaaacaaactccaaaacaaaaaacca

SEQ ID NO: 51620 - DNA, 50 bp, synthetic construct
  source 1..50: mol_type = other DNA
aaaaaataaaaactcgaaacgattaaaacgaactccgaaacgaaaaaccg

SEQ ID NO: 51621 - DNA, 50 bp, synthetic construct
  source 1..50: mol_type = other DNA
aaaaaaaccaaaacaaactccaaaaataaactcaaaaacaactaaataca

SEQ ID NO: 51622 - DNA, 50 bp, synthetic construct
  source 1..50: mol_type = other DNA
aaaaaaaccgaaacgaactccgaaaataaactcgaaaacgactaaatacg

SEQ ID NO: 51623 - DNA, 50 bp, synthetic construct
  source 1..50: mol_type = other DNA
aaataaacaacaccacctaatacttaaaccaaaaactacaaccaactcca

SEQ ID NO: 51624 - DNA, 50 bp, synthetic construct
  source 1..50: mol_type = other DNA
aaataaacaacaccgcctaatacttaaaccgaaaactacaaccgactccg

SEQ ID NO: 51625 - DNA, 50 bp, synthetic construct
  source 1..50: mol_type = other DNA
caaacaaaaataataataaaaatcccaccaaatccaaaacaataacaaca

SEQ ID NO: 51626 - DNA, 50 bp, synthetic construct
  source 1..50: mol_type = other DNA
cgaacaaaaataataataaaaatcccgccgaatccgaaacgataacaacg

SEQ ID NO: 51627 - DNA, 50 bp, synthetic construct
  source 1..50: mol_type = other DNA
ataacaacccaaacaaaaataataataaaaatcccaccaaatccaaaaca

SEQ ID NO: 51628 - DNA, 50 bp, synthetic construct
  source 1..50: mol_type = other DNA
ataacgacccgaacaaaaataataataaaaatcccgccgaatccgaaacg

SEQ ID NO: 51629 - DNA, 50 bp, synthetic construct
  source 1..50: mol_type = other DNA
aaacacaaaaaataacaacccaaacaaaaataataataaaaatcccacca

SEQ ID NO: 51630 - DNA, 50 bp, synthetic construct
  source 1..50: mol_type = other DNA
aaacgcgaaaaataacgacccgaacaaaaataataataaaaatcccgccg

SEQ ID NO: 51631 - DNA, 50 bp, synthetic construct
  source 1..50: mol_type = other DNA
aataaacacaaaaaataacaacccaaacaaaaataataataaaaatccca

SEQ ID NO: 51632 - DNA, 50 bp, synthetic construct
  source 1..50: mol_type = other DNA
gataaacgcgaaaaataacgacccgaacaaaaataataataaaaatcccg

SEQ ID NO: 51633 - DNA, 50 bp, synthetic construct
  source 1..50: mol_type = other DNA
acaatacaaaaaaaattaatctacattcaaaccaaaaaacaaattataca

SEQ ID NO: 51634 - DNA, 50 bp, synthetic construct
  source 1..50: mol_type = other DNA
acgatacgaaaaaaattaatctacattcgaaccgaaaaacgaattatacg

SEQ ID NO: 51635 - DNA, 50 bp, synthetic construct
  source 1..50: mol_type = other DNA
aaaaaaattaatctacattcaaaccaaaaaacaaattatacacatactca

SEQ ID NO: 51636 - DNA, 50 bp, synthetic construct
  source 1..50: mol_type = other DNA
aaaaaaattaatctacattcgaaccgaaaaacgaattatacgcatactcg

SEQ ID NO: 51637 - DNA, 50 bp, synthetic construct
  source 1..50: mol_type = other DNA
caaaataaataaccacttactcccttactcaactcttaacacacacaaca

SEQ ID NO: 51638 - DNA, 50 bp, synthetic construct
  source 1..50: mol_type = other DNA
caaaataaataaccgcttactcccttactcaactcttaacgcacacgacg

SEQ ID NO: 51639 - DNA, 50 bp, synthetic construct
  source 1..50: mol_type = other DNA
aaacaaaataaataaccacttactcccttactcaactcttaacacacaca

SEQ ID NO: 51640 - DNA, 50 bp, synthetic construct
  source 1..50: mol_type = other DNA
aaacaaaataaataaccgcttactcccttactcaactcttaacgcacacg

SEQ ID NO: 51641 - DNA, 50 bp, synthetic construct
  source 1..50: mol_type = other DNA
atcacaaaaactactaaaaaactaaataactaatcccaacatactacaca

SEQ ID NO: 51642 - DNA, 50 bp, synthetic construct
  source 1..50: mol_type = other DNA
gtcgcaaaaactactaaaaaactaaataactaatcccgacgtactacgcg

SEQ ID NO: 51643 - DNA, 50 bp, synthetic construct
  source 1..50: mol_type = other DNA
ccatcacaaaaactactaaaaaactaaataactaatcccaacatactaca

SEQ ID NO: 51644 - DNA, 50 bp, synthetic construct
  source 1..50: mol_type = other DNA
ccgtcgcaaaaactactaaaaaactaaataactaatcccgacgtactacg

SEQ ID NO: 51645 - DNA, 50 bp, synthetic construct
  source 1..50: mol_type = other DNA
caaaaaccaaaccaaaacccttcatctacaacaaataaaaaacaaaaaca

SEQ ID NO: 51646 - DNA, 50 bp, synthetic construct
  source 1..50: mol_type = other DNA
cgaaaaccgaaccgaaacccttcatctacgacgaataaaaaacgaaaacg

SEQ ID NO: 51647 - DNA, 50 bp, synthetic construct
  source 1..50: mol_type = other DNA
aaaaacaaaaacaccaaaaatactaaaaaatcaaaatatataaatacaca

SEQ ID NO: 51648 - DNA, 50 bp, synthetic construct
  source 1..50: mol_type = other DNA
aaaaacgaaaacgccaaaaatactaaaaaatcgaaatatataaatacgcg

SEQ ID NO: 51649 - DNA, 50 bp, synthetic construct
  source 1..50: mol_type = other DNA
caccaaaaatactaaaaaatcaaaatatataaatacacacaaacaaaaca

SEQ ID NO: 51650 - DNA, 50 bp, synthetic construct
  source 1..50: mol_type = other DNA
cgccaaaaatactaaaaaatcgaaatatataaatacgcgcaaacgaaacg

SEQ ID NO: 51651 - DNA, 50 bp, synthetic construct
  source 1..50: mol_type = other DNA
tcaaaatatataaatacacacaaacaaaacaaaataaaaaccaaacaaca

SEQ ID NO: 51652 - DNA, 50 bp, synthetic construct
  source 1..50: mol_type = other DNA
tcgaaatatataaatacgcgcaaacgaaacgaaataaaaaccgaacgacg

SEQ ID NO: 51653 - DNA, 50 bp, synthetic construct
  source 1..50: mol_type = other DNA
atatataaatacacacaaacaaaacaaaataaaaaccaaacaacaaacca

SEQ ID NO: 51654 - DNA, 50 bp, synthetic construct
  source 1..50: mol_type = other DNA
atatataaatacgcgcaaacgaaacgaaataaaaaccgaacgacgaaccg

SEQ ID NO: 51655 - DNA, 50 bp, synthetic construct
  source 1..50: mol_type = other DNA
tcttcaaaccacataccaactacaaccaacataaaaaattactaaaaaca

SEQ ID NO: 51656 - DNA, 50 bp, synthetic construct
  source 1..50: mol_type = other DNA
tcttcgaaccgcgtaccgactacaaccgacataaaaaattactaaaaacg

SEQ ID NO: 51657 - DNA, 50 bp, synthetic construct
  source 1..50: mol_type = other DNA
aaacaacaaaaaaccctactaactacaactaaaaaaaataccaaaaccca

SEQ ID NO: 51658 - DNA, 50 bp, synthetic construct
  source 1..50: mol_type = other DNA
gaacaacgaaaaaccctactaactacaactaaaaaaaataccgaaacccg

SEQ ID NO: 51659 - DNA, 50 bp, synthetic construct
  source 1..50: mol_type = other DNA
aaaaccctactaactacaactaaaaaaaataccaaaacccaaacctctca

SEQ ID NO: 51660 - DNA, 50 bp, synthetic construct
  source 1..50: mol_type = other DNA
aaaaccctactaactacaactaaaaaaaataccgaaacccgaacctctcg

SEQ ID NO: 51661 - DNA, 50 bp, synthetic construct
  source 1..50: mol_type = other DNA
attcaaaaaatactcaaaccactcaaaaacacccaaaaaaacccaaaaca

SEQ ID NO: 51662 - DNA, 50 bp, synthetic construct
  source 1..50: mol_type = other DNA
attcaaaaaatactcgaaccgctcgaaaacgcccaaaaaaacccaaaacg

SEQ ID NO: 51663 - DNA, 50 bp, synthetic construct
  source 1..50: mol_type = other DNA
aacttactaaaaaaactaccaaaaacaacaccacctcaaataaaaaacca

SEQ ID NO: 51664 - DNA, 50 bp, synthetic construct
  source 1..50: mol_type = other DNA
gacttactaaaaaaactaccaaaaacaacgccgcctcaaataaaaaaccg

SEQ ID NO: 51665 - DNA, 50 bp, synthetic construct
  source 1..50: mol_type = other DNA
aaaaaactaccaaaaacaacaccacctcaaataaaaaaccaataaactca

SEQ ID NO: 51666 - DNA, 50 bp, synthetic construct
  source 1..50: mol_type = other DNA
aaaaaactaccaaaaacaacgccgcctcaaataaaaaaccgataaactcg

SEQ ID NO: 51667 - DNA, 50 bp, synthetic construct
  source 1..50: mol_type = other DNA
ataaaaataacaccataccaaaacttaattataaaattaaataatccaca

SEQ ID NO: 51668 - DNA, 50 bp, synthetic construct
  source 1..50: mol_type = other DNA
gtaaaaataacgccgtaccgaaacttaattataaaattaaataatccgcg

SEQ ID NO: 51669 - DNA, 50 bp, synthetic construct
  source 1..50: mol_type = other DNA
taacaccataccaaaacttaattataaaattaaataatccacaaaaacca

SEQ ID NO: 51670 - DNA, 50 bp, synthetic construct
  source 1..50: mol_type = other DNA
taacgccgtaccgaaacttaattataaaattaaataatccgcgaaaaccg

SEQ ID NO: 51671 - DNA, 50 bp, synthetic construct
  source 1..50: mol_type = other DNA
aaaaaaaataaatactactctcctcttccacaaaaaaatctatacctcca

SEQ ID NO: 51672 - DNA, 50 bp, synthetic construct
  source 1..50: mol_type = other DNA
aaaaaaaataaatactactctcctcttccgcgaaaaaatctatacctccg

SEQ ID NO: 51673 - DNA, 50 bp, synthetic construct
  source 1..50: mol_type = other DNA
ataatccacaaaaaccaactaaaaacctaacaaaaatacaaaccctccca

SEQ ID NO: 51674 - DNA, 50 bp, synthetic construct
  source 1..50: mol_type = other DNA
ataatccgcgaaaaccgactaaaaacctaacgaaaatacaaaccctcccg

SEQ ID NO: 51675 - DNA, 50 bp, synthetic construct
  source 1..50: mol_type = other DNA
aaccccatctctactaaaactacaaaaattaaccaaaccaataactcaca

SEQ ID NO: 51676 - DNA, 50 bp, synthetic construct
  source 1..50: mol_type = other DNA
aaccccgtctctactaaaactacaaaaattaaccaaaccaataactcacg

SEQ ID NO: 51677 - DNA, 50 bp, synthetic construct
  source 1..50: mol_type = other DNA
aaatcaaaacaaccttatacccaactaactaactaaaccaaacccaaaca

SEQ ID NO: 51678 - DNA, 50 bp, synthetic construct
  source 1..50: mol_type = other DNA
aaatcaaaacgaccttatacccgactaactaactaaaccaaacccaaacg

SEQ ID NO: 51679 - DNA, 50 bp, synthetic construct
  source 1..50: mol_type = other DNA
cctaaaaacattaccaaccacctaactaccttccactaaaaactattcca

SEQ ID NO: 51680 - DNA, 50 bp, synthetic construct
  source 1..50: mol_type = other DNA
cctaaaaacgttaccaaccacctaactaccttccactaaaaactattccg

SEQ ID NO: 51681 - DNA, 50 bp, synthetic construct
  source 1..50: mol_type = other DNA
cacaactactcaaaaaattcatcaaaatcacaaccctataaatacaacca

SEQ ID NO: 51682 - DNA, 50 bp, synthetic construct
  source 1..50: mol_type = other DNA
cgcaactactcaaaaaattcatcaaaatcgcgaccctataaatacgaccg

SEQ ID NO: 51683 - DNA, 50 bp, synthetic construct
  source 1..50: mol_type = other DNA
aactactcaaaaaattcatcaaaatcacaaccctataaatacaaccatca

SEQ ID NO: 51684 - DNA, 50 bp, synthetic construct
  source 1..50: mol_type = other DNA
aactactcaaaaaattcatcaaaatcgcgaccctataaatacgaccgtcg

SEQ ID NO: 51685 - DNA, 50 bp, synthetic construct
  source 1..50: mol_type = other DNA
cctataaatacaaccatcaacaaaataaaaaaccaaaaaccaaaaaccca

SEQ ID NO: 51686 - DNA, 50 bp, synthetic construct
  source 1..50: mol_type = other DNA
cctataaatacgaccgtcgacgaaataaaaaaccgaaaaccgaaaacccg

SEQ ID NO: 51687 - DNA, 50 bp, synthetic construct
  source 1..50: mol_type = other DNA
ctacttacaactacaaaaataaaaaacaaaatcaaaaacaaacaacaaca

SEQ ID NO: 51688 - DNA, 50 bp, synthetic construct
  source 1..50: mol_type = other DNA
ctacttacaactacgaaaataaaaaacgaaatcaaaaacgaacgacgacg

SEQ ID NO: 51689 - DNA, 50 bp, synthetic construct
  source 1..50: mol_type = other DNA
aaataaatcaaaaacaactaacaacaacattatccaaccccataaccaca

SEQ ID NO: 51690 - DNA, 50 bp, synthetic construct
  source 1..50: mol_type = other DNA
aaataaatcgaaaacgactaacaacgacgttatccaaccccataaccacg

SEQ ID NO: 51691 - DNA, 50 bp, synthetic construct
  source 1..50: mol_type = other DNA
acaaaaaaaatctcatcacctcccaaataaatcaaaaacaactaacaaca

SEQ ID NO: 51692 - DNA, 50 bp, synthetic construct
  source 1..50: mol_type = other DNA
acgaaaaaaatctcatcacctcccaaataaatcgaaaacgactaacaacg

SEQ ID NO: 51693 - DNA, 50 bp, synthetic construct
  source 1..50: mol_type = other DNA
ctatctttctacaccataatcataaaactaaacaacaccactatcaacca

SEQ ID NO: 51694 - DNA, 50 bp, synthetic construct
  source 1..50: mol_type = other DNA
ctatctttctacgccgtaatcataaaactaaacaacgccgctatcaaccg

SEQ ID NO: 51695 - DNA, 50 bp, synthetic construct
  source 1..50: mol_type = other DNA
aaaaacacacttcaaaaaacccaaaatacccaaattcccaaataaaaaca

SEQ ID NO: 51696 - DNA, 50 bp, synthetic construct
  source 1..50: mol_type = other DNA
aaaaacgcacttcgaaaaacccgaaatacccaaattcccaaataaaaacg

SEQ ID NO: 51697 - DNA, 50 bp, synthetic construct
  source 1..50: mol_type = other DNA
acactaaaaacaataaaaacaaatccatttccaaattaacaaaaaaaaca

SEQ ID NO: 51698 - DNA, 50 bp, synthetic construct
  source 1..50: mol_type = other DNA
acgctaaaaacgataaaaacaaatccatttccgaattaacaaaaaaaacg

SEQ ID NO: 51699 - DNA, 50 bp, synthetic construct
  source 1..50: mol_type = other DNA
acaataaaaacaaatccatttccaaattaacaaaaaaaacaataacaaca

SEQ ID NO: 51700 - DNA, 50 bp, synthetic construct
  source 1..50: mol_type = other DNA
acgataaaaacaaatccatttccgaattaacaaaaaaaacgataacgacg

SEQ ID NO: 51701 - DNA, 50 bp, synthetic construct
  source 1..50: mol_type = other DNA
ataaaaacaaatccatttccaaattaacaaaaaaaacaataacaacaaca

SEQ ID NO: 51702 - DNA, 50 bp, synthetic construct
  source 1..50: mol_type = other DNA
ataaaaacaaatccatttccgaattaacaaaaaaaacgataacgacgacg

SEQ ID NO: 51703 - DNA, 50 bp, synthetic construct
  source 1..50: mol_type = other DNA
aaaacaaatccatttccaaattaacaaaaaaaacaataacaacaacaaca

SEQ ID NO: 51704 - DNA, 50 bp, synthetic construct
  source 1..50: mol_type = other DNA
aaaacaaatccatttccgaattaacaaaaaaaacgataacgacgacgacg

SEQ ID NO: 51705 - DNA, 50 bp, synthetic construct
  source 1..50: mol_type = other DNA
acaaatccatttccaaattaacaaaaaaaacaataacaacaacaacaaca

SEQ ID NO: 51706 - DNA, 50 bp, synthetic construct
  source 1..50: mol_type = other DNA
acaaatccatttccgaattaacaaaaaaaacgataacgacgacgacgacg

SEQ ID NO: 51707 - DNA, 50 bp, synthetic construct
  source 1..50: mol_type = other DNA
aatccatttccaaattaacaaaaaaaacaataacaacaacaacaacaaca

SEQ ID NO: 51708 - DNA, 50 bp, synthetic construct
  source 1..50: mol_type = other DNA
aatccatttccgaattaacaaaaaaaacgataacgacgacgacgacgacg

SEQ ID NO: 51709 - DNA, 50 bp, synthetic construct
  source 1..50: mol_type = other DNA
aacaaaaaattcactcccaaaacaactacaaccaaatcaaaaaaaaacca

SEQ ID NO: 51710 - DNA, 50 bp, synthetic construct
  source 1..50: mol_type = other DNA
gacaaaaaattcgctcccaaaacaactacgaccaaatcgaaaaaaaaccg

SEQ ID NO: 51711 - DNA, 50 bp, synthetic construct
  source 1..50: mol_type = other DNA
aaaattcactcccaaaacaactacaaccaaatcaaaaaaaaaccaaaaca

SEQ ID NO: 51712 - DNA, 50 bp, synthetic construct
  source 1..50: mol_type = other DNA
aaaattcgctcccaaaacaactacgaccaaatcgaaaaaaaaccgaaacg

SEQ ID NO: 51713 - DNA, 50 bp, synthetic construct
  source 1..50: mol_type = other DNA
aattcttttttctttttttttcttttaaaaaacataatctcactctatca

SEQ ID NO: 51714 - DNA, 50 bp, synthetic construct
  source 1..50: mol_type = other DNA
aattcttttttctttttttttcttttaaaaaacgtaatctcactctatcg

SEQ ID NO: 51715 - DNA, 50 bp, synthetic construct
  source 1..50: mol_type = other DNA
aaaaaaccaaaacaaataaatcacaaaatcaaaaaatcaaaacatcctca

SEQ ID NO: 51716 - DNA, 50 bp, synthetic construct
  source 1..50: mol_type = other DNA
aaaaaaccgaaacgaataaatcacaaaatcaaaaaatcaaaacatcctcg

SEQ ID NO: 51717 - DNA, 50 bp, synthetic construct
  source 1..50: mol_type = other DNA
atcattatattaaaaaaacaaactaaaccaaacacaataactcacaccca

SEQ ID NO: 51718 - DNA, 50 bp, synthetic construct
  source 1..50: mol_type = other DNA
atcattatattaaaaaaacaaactaaaccgaacgcgataactcacgcccg

SEQ ID NO: 51719 - DNA, 50 bp, synthetic construct
  source 1..50: mol_type = other DNA
aaaaatcattatattaaaaaaacaaactaaaccaaacacaataactcaca

SEQ ID NO: 51720 - DNA, 50 bp, synthetic construct
  source 1..50: mol_type = other DNA
aaaaatcattatattaaaaaaacaaactaaaccgaacgcgataactcacg

SEQ ID NO: 51721 - DNA, 50 bp, synthetic construct
  source 1..50: mol_type = other DNA
caccaaaacccaacctcaattctaattaactataatcacaaaacctttca

SEQ ID NO: 51722 - DNA, 50 bp, synthetic construct
  source 1..50: mol_type = other DNA
cgccaaaacccgacctcgattctaattaactataatcacaaaacctttcg

SEQ ID NO: 51723 - DNA, 50 bp, synthetic construct
  source 1..50: mol_type = other DNA
caaaaaactctataactacaaccaatcaaaatcaaaaccaaactttaaca

SEQ ID NO: 51724 - DNA, 50 bp, synthetic construct
  source 1..50: mol_type = other DNA
cgaaaaactctataactacaaccaatcaaaatcgaaaccgaactttaacg

SEQ ID NO: 51725 - DNA, 50 bp, synthetic construct
  source 1..50: mol_type = other DNA
ccaaactttaacaaaaaataaaaacactataaccattcaaatttaacaca

SEQ ID NO: 51726 - DNA, 50 bp, synthetic construct
  source 1..50: mol_type = other DNA
ccgaactttaacgaaaaataaaaacgctataaccattcgaatttaacgcg

SEQ ID NO: 51727 - DNA, 50 bp, synthetic construct
  source 1..50: mol_type = other DNA
tttaacaaaaaataaaaacactataaccattcaaatttaacacaaacaca

SEQ ID NO: 51728 - DNA, 50 bp, synthetic construct
  source 1..50: mol_type = other DNA
tttaacgaaaaataaaaacgctataaccattcgaatttaacgcgaacgcg

SEQ ID NO: 51729 - DNA, 50 bp, synthetic construct
  source 1..50: mol_type = other DNA
ctataaccattcaaatttaacacaaacacaactaaaatttactactacca

SEQ ID NO: 51730 - DNA, 50 bp, synthetic construct
  source 1..50: mol_type = other DNA
ctataaccattcgaatttaacgcgaacgcgactaaaatttactactaccg

SEQ ID NO: 51731 - DNA, 50 bp, synthetic construct
  source 1..50: mol_type = other DNA
ttattcaaaaacttataataataaatccaaaaaactacatataaaaaaca

SEQ ID NO: 51732 - DNA, 50 bp, synthetic construct
  source 1..50: mol_type = other DNA
ttattcaaaaacttataataataaatccgaaaaactacgtataaaaaacg

SEQ ID NO: 51733 - DNA, 50 bp, synthetic construct
  source 1..50: mol_type = other DNA
ttcacatctattctcaatcccattcaatctctactttccatcaaccttca

SEQ ID NO: 51734 - DNA, 50 bp, synthetic construct
  source 1..50: mol_type = other DNA
ttcgcatctattctcaatcccattcaatctctactttccatcaaccttcg

SEQ ID NO: 51735 - DNA, 50 bp, synthetic construct
  source 1..50: mol_type = other DNA
tatcctatccaaattcatccacaaacatacactcaaccaacaaaaataca

SEQ ID NO: 51736 - DNA, 50 bp, synthetic construct
  source 1..50: mol_type = other DNA
tatcctatccaaattcatccgcaaacatacgctcaaccgacaaaaatacg

SEQ ID NO: 51737 - DNA, 50 bp, synthetic construct
  source 1..50: mol_type = other DNA
aaattaaacaataacatccacatctaaaaaccattaacacattcctacca

SEQ ID NO: 51738 - DNA, 50 bp, synthetic construct
  source 1..50: mol_type = other DNA
aaattaaacgataacgtccacatctaaaaaccattaacgcattcctaccg

SEQ ID NO: 51739 - DNA, 50 bp, synthetic construct
  source 1..50: mol_type = other DNA
caataacatccacatctaaaaaccattaacacattcctaccaactaaaca

SEQ ID NO: 51740 - DNA, 50 bp, synthetic construct
  source 1..50: mol_type = other DNA
cgataacgtccacatctaaaaaccattaacgcattcctaccgactaaacg

SEQ ID NO: 51741 - DNA, 50 bp, synthetic construct
  source 1..50: mol_type = other DNA
aaactaaaccataaaaatccaaaaaaatccctccctcaaacccaaaacca

SEQ ID NO: 51742 - DNA, 50 bp, synthetic construct
  source 1..50: mol_type = other DNA
aaactaaaccgtaaaaatccgaaaaaatccctccctcaaacccaaaaccg

SEQ ID NO: 51743 - DNA, 50 bp, synthetic construct
  source 1..50: mol_type = other DNA
cctataaatccacccctaactaataattaatcaataaacaaacaaaaaca

SEQ ID NO: 51744 - DNA, 50 bp, synthetic construct
  source 1..50: mol_type = other DNA
cctataaatccgcccctaactaataattaatcgataaacgaacaaaaacg

SEQ ID NO: 51745 - DNA, 50 bp, synthetic construct
  source 1..50: mol_type = other DNA
ctaaaactccaaataaaatttcaacctccacacataactcactataacca

SEQ ID NO: 51746 - DNA, 50 bp, synthetic construct
  source 1..50: mol_type = other DNA
ctaaaactccgaataaaatttcaacctccgcacgtaactcgctataaccg

SEQ ID NO: 51747 - DNA, 50 bp, synthetic construct
  source 1..50: mol_type = other DNA
atacaaaatcccaaaaaaaaaaccatccaaaaaaccacaactcaaaaaca

SEQ ID NO: 51748 - DNA, 50 bp, synthetic construct
  source 1..50: mol_type = other DNA
atacgaaatcccgaaaaaaaaaccgtccaaaaaaccgcgactcaaaaacg

SEQ ID NO: 51749 - DNA, 50 bp, synthetic construct
  source 1..50: mol_type = other DNA
actcaacatcaaaatacaaaatcccaaaaaaaaaaccatccaaaaaacca

SEQ ID NO: 51750 - DNA, 50 bp, synthetic construct
  source 1..50: mol_type = other DNA
actcgacatcaaaatacgaaatcccgaaaaaaaaaccgtccaaaaaaccg

SEQ ID NO: 51751 - DNA, 50 bp, synthetic construct
  source 1..50: mol_type = other DNA
caccctaatactactcaacatcaaaatacaaaatcccaaaaaaaaaacca

SEQ ID NO: 51752 - DNA, 50 bp, synthetic construct
  source 1..50: mol_type = other DNA
cgccctaatactactcgacatcaaaatacgaaatcccgaaaaaaaaaccg

SEQ ID NO: 51753 - DNA, 50 bp, synthetic construct
  source 1..50: mol_type = other DNA
aaaaaaaattacctcacaacaaaaaaaacaacccattcaaaataccaaca

SEQ ID NO: 51754 - DNA, 50 bp, synthetic construct
  source 1..50: mol_type = other DNA
aaaaaaaattacctcgcaacgaaaaaaacaacccgttcgaaataccaacg

SEQ ID NO: 51755 - DNA, 50 bp, synthetic construct
  source 1..50: mol_type = other DNA
taattcctcccctaaaaattttaaaaaacccctaattcccacaaacatca

SEQ ID NO: 51756 - DNA, 50 bp, synthetic construct
  source 1..50: mol_type = other DNA
taattcctcccctaaaaattttaaaaaacccctaattcccgcaaacgtcg

SEQ ID NO: 51757 - DNA, 50 bp, synthetic construct
  source 1..50: mol_type = other DNA
ctaaacacaacaacaacaaattaaaaaacccaaaaaaccccaaattccca

SEQ ID NO: 51758 - DNA, 50 bp, synthetic construct
  source 1..50: mol_type = other DNA
ctaaacacgacgacaacgaattaaaaaacccaaaaaaccccgaattcccg

SEQ ID NO: 51759 - DNA, 50 bp, synthetic construct
  source 1..50: mol_type = other DNA
atccaaaataaaaaaaccccatctataaatctacctacaccatatcttca

SEQ ID NO: 51760 - DNA, 50 bp, synthetic construct
  source 1..50: mol_type = other DNA
atccaaaataaaaaaaccccgtctataaatctacctacgccgtatcttcg

SEQ ID NO: 51761 - DNA, 50 bp, synthetic construct
  source 1..50: mol_type = other DNA
acaaaaattcccaacaacaattctacaacaactcaaacacaaaaaacaca

SEQ ID NO: 51762 - DNA, 50 bp, synthetic construct
  source 1..50: mol_type = other DNA
acaaaaattcccaacgacgattctacaacaactcgaacgcgaaaaacacg

SEQ ID NO: 51763 - DNA, 50 bp, synthetic construct
  source 1..50: mol_type = other DNA
atataaatatctcttacttcatctaaatcttacctcccactccaatccca

SEQ ID NO: 51764 - DNA, 50 bp, synthetic construct
  source 1..50: mol_type = other DNA
atataaatatctcttacttcgtctaaatcttacctcccgctccaatcccg

SEQ ID NO: 51765 - DNA, 50 bp, synthetic construct
  source 1..50: mol_type = other DNA
aatctcaatacccttcaccaactaaccaaaccaaataataaaaaataaca

SEQ ID NO: 51766 - DNA, 50 bp, synthetic construct
  source 1..50: mol_type = other DNA
aatctcaatacccttcgccgactaaccgaaccaaataataaaaaataacg

SEQ ID NO: 51767 - DNA, 50 bp, synthetic construct
  source 1..50: mol_type = other DNA
aaactaaatcaatacccccttctcaatataaaaacaacactctctcccca

SEQ ID NO: 51768 - DNA, 50 bp, synthetic construct
  source 1..50: mol_type = other DNA
aaactaaatcaatacccccttctcaatataaaaacaacgctctctccccg

SEQ ID NO: 51769 - DNA, 50 bp, synthetic construct
  source 1..50: mol_type = other DNA
ggtatggggtagatataatattttggttttgatttatttaaaaggaagat

SEQ ID NO: 51770 - DNA, 50 bp, synthetic construct
  source 1..50: mol_type = other DNA
ggtatggggtagatataatatttcggttttgatttatttaaaaggaagac

SEQ ID NO: 51771 - DNA, 50 bp, synthetic construct
  source 1..50: mol_type = other DNA
aatactaattccccaactaaaaaacaccttaaacaaaactttactcacca

SEQ ID NO: 51772 - DNA, 50 bp, synthetic construct
  source 1..50: mol_type = other DNA
gatactaattccccaactaaaaaacaccttaaacgaaactttactcgccg

SEQ ID NO: 51773 - DNA, 50 bp, synthetic construct
  source 1..50: mol_type = other DNA
ttccccaactaaaaaacaccttaaacaaaactttactcaccaaaaacaca

SEQ ID NO: 51774 - DNA, 50 bp, synthetic construct
  source 1..50: mol_type = other DNA
ttccccaactaaaaaacaccttaaacgaaactttactcgccgaaaacacg

SEQ ID NO: 51775 - DNA, 50 bp, synthetic construct
  source 1..50: mol_type = other DNA
actaaaaaacaccttaaacaaaactttactcaccaaaaacacacaaaaca

SEQ ID NO: 51776 - DNA, 50 bp, synthetic construct
  source 1..50: mol_type = other DNA
actaaaaaacaccttaaacgaaactttactcgccgaaaacacgcaaaacg

SEQ ID NO: 51777 - DNA, 50 bp, synthetic construct
  source 1..50: mol_type = other DNA
acaccaacttatatcattatctataacatcatatataactccaaccacca

SEQ ID NO: 51778 - DNA, 50 bp, synthetic construct
  source 1..50: mol_type = other DNA
acaccgacttatatcattatctataacatcatatataactccgaccgccg

SEQ ID NO: 51779 - DNA, 50 bp, synthetic construct
  source 1..50: mol_type = other DNA
attccaacaaccaaaatcacacataatatcacaaacaataacacaaacca

SEQ ID NO: 51780 - DNA, 50 bp, synthetic construct
  source 1..50: mol_type = other DNA
attccgacgaccgaaatcacacataatatcacaaacaataacacaaaccg

SEQ ID NO: 51781 - DNA, 50 bp, synthetic construct
  source 1..50: mol_type = other DNA
atcacacaaaaccaaatatttaacacccaaatataacattatacaactca

SEQ ID NO: 51782 - DNA, 50 bp, synthetic construct
  source 1..50: mol_type = other DNA
atcgcgcgaaaccaaatatttaacacccgaatataacattatacaactcg

SEQ ID NO: 51783 - DNA, 50 bp, synthetic construct
  source 1..50: mol_type = other DNA
tacaaccaaacacaccaaaaataaattaaaccaaaaacaatacctaaaca

SEQ ID NO: 51784 - DNA, 50 bp, synthetic construct
  source 1..50: mol_type = other DNA
tacaaccgaacgcgccgaaaataaattaaaccaaaaacgatacctaaacg

SEQ ID NO: 51785 - DNA, 50 bp, synthetic construct
  source 1..50: mol_type = other DNA
ccaaacacaccaaaaataaattaaaccaaaaacaatacctaaacaaaaca

SEQ ID NO: 51786 - DNA, 50 bp, synthetic construct
  source 1..50: mol_type = other DNA
ccgaacgcgccgaaaataaattaaaccaaaaacgatacctaaacgaaacg

SEQ ID NO: 51787 - DNA, 50 bp, synthetic construct
  source 1..50: mol_type = other DNA
caaccaaaaatccaaaacttctccaaaaattctccataacaaaaattcca

SEQ ID NO: 51788 - DNA, 50 bp, synthetic construct
  source 1..50: mol_type = other DNA
caaccgaaaatccgaaacttctccaaaaattctccgtaacgaaaattccg

SEQ ID NO: 51789 - DNA, 50 bp, synthetic construct
  source 1..50: mol_type = other DNA
aaactcaacaacttcacctcaaaaaaactcccatctaaaatctcataaca

SEQ ID NO: 51790 - DNA, 50 bp, synthetic construct
  source 1..50: mol_type = other DNA
aaactcaacgacttcacctcgaaaaaactcccgtctaaaatctcgtaacg

SEQ ID NO: 51791 - DNA, 50 bp, synthetic construct
  source 1..50: mol_type = other DNA
atctttcccctcaaaaacaaaaaatccaaactaaaaaatcctacacacca

SEQ ID NO: 51792 - DNA, 50 bp, synthetic construct
  source 1..50: mol_type = other DNA
atctttcccctcgaaaacaaaaaatccgaactaaaaaatcctacgcgccg

SEQ ID NO: 51793 - DNA, 50 bp, synthetic construct
  source 1..50: mol_type = other DNA
aaccattccaaaacaaaatccaaaacaaaataaaatacaaacccaaaaca

SEQ ID NO: 51794 - DNA, 50 bp, synthetic construct
  source 1..50: mol_type = other DNA
aaccattccaaaacgaaatccgaaacgaaataaaatacgaacccgaaacg

SEQ ID NO: 51795 - DNA, 50 bp, synthetic construct
  source 1..50: mol_type = other DNA
atttaaaccattccaaaacaaaatccaaaacaaaataaaatacaaaccca

SEQ ID NO: 51796 - DNA, 50 bp, synthetic construct
  source 1..50: mol_type = other DNA
atttaaaccattccaaaacgaaatccgaaacgaaataaaatacgaacccg

SEQ ID NO: 51797 - DNA, 50 bp, synthetic construct
  source 1..50: mol_type = other DNA
acaataatttaaaccattccaaaacaaaatccaaaacaaaataaaataca

SEQ ID NO: 51798 - DNA, 50 bp, synthetic construct
  source 1..50: mol_type = other DNA
acaataatttaaaccattccaaaacgaaatccgaaacgaaataaaatacg

SEQ ID NO: 51799 - DNA, 50 bp, synthetic construct
  source 1..50: mol_type = other DNA
aaaccaatacatacaataatttaaaccattccaaaacaaaatccaaaaca

SEQ ID NO: 51800 - DNA, 50 bp, synthetic construct
  source 1..50: mol_type = other DNA
aaaccgatacgtacaataatttaaaccattccaaaacgaaatccgaaacg

SEQ ID NO: 51801 - DNA, 50 bp, synthetic construct
  source 1..50: mol_type = other DNA
ctaaaaaaccaatacatacaataatttaaaccattccaaaacaaaatcca

SEQ ID NO: 51802 - DNA, 50 bp, synthetic construct
  source 1..50: mol_type = other DNA
ctaaaaaaccgatacgtacaataatttaaaccattccaaaacgaaatccg

SEQ ID NO: 51803 - DNA, 50 bp, synthetic construct
  source 1..50: mol_type = other DNA
tttcacttaacccatattacccttactaaacaattaaaccctcccaacca

SEQ ID NO: 51804 - DNA, 50 bp, synthetic construct
  source 1..50: mol_type = other DNA
tttcacttaacccgtattacccttactaaacaattaaaccctcccgaccg

SEQ ID NO: 51805 - DNA, 50 bp, synthetic construct
  source 1..50: mol_type = other DNA
atcacacaaaaaaaaactctccctcaaactttaacaaataaaatctaaca

SEQ ID NO: 51806 - DNA, 50 bp, synthetic construct
  source 1..50: mol_type = other DNA
atcgcacaaaaaaaaactctccctcgaactttaacaaataaaatctaacg

SEQ ID NO: 51807 - DNA, 50 bp, synthetic construct
  source 1..50: mol_type = other DNA
aaacaaaaactaaaaacaacaactatcacacaaaaaaaaactctccctca

SEQ ID NO: 51808 - DNA, 50 bp, synthetic construct
  source 1..50: mol_type = other DNA
aaacaaaaactaaaaacaacaactatcgcacaaaaaaaaactctccctcg

SEQ ID NO: 51809 - DNA, 50 bp, synthetic construct
  source 1..50: mol_type = other DNA
ctccccaaccatccccaaaaactacaaaaaaaactacaaaaaaacaaaca

SEQ ID NO: 51810 - DNA, 50 bp, synthetic construct
  source 1..50: mol_type = other DNA
ctccccaaccatccccaaaaactacgaaaaaaactacgaaaaaacgaacg

SEQ ID NO: 51811 - DNA, 50 bp, synthetic construct
  source 1..50: mol_type = other DNA
caatttcctaaaaaaaatcaacaaaaaatcaaccaaacccccaaccaaca

SEQ ID NO: 51812 - DNA, 50 bp, synthetic construct
  source 1..50: mol_type = other DNA
cgatttcctaaaaaaaatcaacaaaaaatcaaccgaacccccgaccaacg

SEQ ID NO: 51813 - DNA, 50 bp, synthetic construct
  source 1..50: mol_type = other DNA
aaaaaaccaatttcctaaaaaaaatcaacaaaaaatcaaccaaaccccca

SEQ ID NO: 51814 - DNA, 50 bp, synthetic construct
  source 1..50: mol_type = other DNA
aaaaaaccgatttcctaaaaaaaatcaacaaaaaatcaaccgaacccccg

SEQ ID NO: 51815 - DNA, 50 bp, synthetic construct
  source 1..50: mol_type = other DNA
tatacaaacctacaaacaactcaaaaacataaaaaatccaaaataaaaca

SEQ ID NO: 51816 - DNA, 50 bp, synthetic construct
  source 1..50: mol_type = other DNA
tatacgaacctacgaacgactcgaaaacgtaaaaaatccgaaataaaacg

SEQ ID NO: 51817 - DNA, 50 bp, synthetic construct
  source 1..50: mol_type = other DNA
tacaaacaactcaaaaacataaaaaatccaaaataaaacactctacacca

SEQ ID NO: 51818 - DNA, 50 bp, synthetic construct
  source 1..50: mol_type = other DNA
tacgaacgactcgaaaacgtaaaaaatccgaaataaaacgctctacgccg

SEQ ID NO: 51819 - DNA, 50 bp, synthetic construct
  source 1..50: mol_type = other DNA
ttcttatcccaataacacatatacaccatattcttctaaatactacaaca

SEQ ID NO: 51820 - DNA, 50 bp, synthetic construct
  source 1..50: mol_type = other DNA
ttcttatcccgataacacgtatacaccatattcttctaaatactacgacg

SEQ ID NO: 51821 - DNA, 50 bp, synthetic construct
  source 1..50: mol_type = other DNA
gggttttttttgttgtagtatttagaagaatatggtgtatatgtgttatt

SEQ ID NO: 51822 - DNA, 50 bp, synthetic construct
  source 1..50: mol_type = other DNA
gggtttttttcgtcgtagtatttagaagaatatggtgtatacgtgttatc

SEQ ID NO: 51823 - DNA, 50 bp, synthetic construct
  source 1..50: mol_type = other DNA
cataataaccaataattaataatatcaaaaataaataacactaacaaaca

SEQ ID NO: 51824 - DNA, 50 bp, synthetic construct
  source 1..50: mol_type = other DNA
cataataaccgataattaataatatcaaaaataaataacgctaacaaacg

SEQ ID NO: 51825 - DNA, 50 bp, synthetic construct
  source 1..50: mol_type = other DNA
aatactattcatcatctactccatacaccaaacaaacaaaaaaacaaaca

SEQ ID NO: 51826 - DNA, 50 bp, synthetic construct
  source 1..50: mol_type = other DNA
gatactattcgtcgtctactccatacaccgaacaaacaaaaaaacgaacg

SEQ ID NO: 51827 - DNA, 50 bp, synthetic construct
  source 1..50: mol_type = other DNA
tgtaagttgtagtaaaatgttagttgtttttatttggagaatgagatttt

SEQ ID NO: 51828 - DNA, 50 bp, synthetic construct
  source 1..50: mol_type = other DNA
tgtaagtcgtagtaaaatgttagttgtttttatttggagaatgagatttc

SEQ ID NO: 51829 - DNA, 50 bp, synthetic construct
  source 1..50: mol_type = other DNA
caacactttaaatatctaaaataaaacaatcacttaaaatcaaaaattca

SEQ ID NO: 51830 - DNA, 50 bp, synthetic construct
  source 1..50: mol_type = other DNA
caacactttaaatatctaaaataaaacgatcacttaaaatcaaaaattcg

SEQ ID NO: 51831 - DNA, 50 bp, synthetic construct
  source 1..50: mol_type = other DNA
ataaaaatcacttaaaccaaacaaacaaaaattataataaaccaaaatca

SEQ ID NO: 51832 - DNA, 50 bp, synthetic construct
  source 1..50: mol_type = other DNA
ataaaaatcacttaaaccaaacaaacgaaaattataataaaccgaaatcg

SEQ ID NO: 51833 - DNA, 50 bp, synthetic construct
  source 1..50: mol_type = other DNA
tactactaccaaactaaaattatttacaatatcatatactcaaaacacca

SEQ ID NO: 51834 - DNA, 50 bp, synthetic construct
  source 1..50: mol_type = other DNA
tactactaccgaactaaaattatttacgatatcgtatactcgaaacaccg

SEQ ID NO: 51835 - DNA, 50 bp, synthetic construct
  source 1..50: mol_type = other DNA
acccaaactactactaccaaactaaaattatttacaatatcatatactca

SEQ ID NO: 51836 - DNA, 50 bp, synthetic construct
  source 1..50: mol_type = other DNA
gcccaaactactactaccgaactaaaattatttacgatatcgtatactcg

SEQ ID NO: 51837 - DNA, 50 bp, synthetic construct
  source 1..50: mol_type = other DNA
caccattacaaatacaactcacaaaaaaaactaacaataaaacctccaca

SEQ ID NO: 51838 - DNA, 50 bp, synthetic construct
  source 1..50: mol_type = other DNA
caccattacaaatacgactcgcgaaaaaaactaacgataaaacctccgcg

SEQ ID NO: 51839 - DNA, 50 bp, synthetic construct
  source 1..50: mol_type = other DNA
caccataaaaatatcaccattacaaatacaactcacaaaaaaaactaaca

SEQ ID NO: 51840 - DNA, 50 bp, synthetic construct
  source 1..50: mol_type = other DNA
caccataaaaatatcaccattacaaatacgactcgcgaaaaaaactaacg

SEQ ID NO: 51841 - DNA, 50 bp, synthetic construct
  source 1..50: mol_type = other DNA
ttaaaccccttcacaaccatcaccataaaaatatcaccattacaaataca

SEQ ID NO: 51842 - DNA, 50 bp, synthetic construct
  source 1..50: mol_type = other DNA
ttaaaccccttcacgaccgtcaccataaaaatatcaccattacaaatacg

SEQ ID NO: 51843 - DNA, 50 bp, synthetic construct
  source 1..50: mol_type = other DNA
aaaaaattcaaataaaactctcctaaccaacacacatctataaaaaaaca

SEQ ID NO: 51844 - DNA, 50 bp, synthetic construct
  source 1..50: mol_type = other DNA
aaaaaattcaaataaaactctcctaaccgacgcgcgtctataaaaaaacg

SEQ ID NO: 51845 - DNA, 50 bp, synthetic construct
  source 1..50: mol_type = other DNA
cttcaaacaaactaaaaaaaaattcaaataaaactctcctaaccaacaca

SEQ ID NO: 51846 - DNA, 50 bp, synthetic construct
  source 1..50: mol_type = other DNA
cttcgaacgaactaaaaaaaaattcaaataaaactctcctaaccgacgcg

SEQ ID NO: 51847 - DNA, 50 bp, synthetic construct
  source 1..50: mol_type = other DNA
tataaaaaacaaactacaattaattcttctaaacaaaaacaataaaaaca

SEQ ID NO: 51848 - DNA, 50 bp, synthetic construct
  source 1..50: mol_type = other DNA
tataaaaaacaaactacgattaattcttctaaacgaaaacgataaaaacg

SEQ ID NO: 51849 - DNA, 50 bp, synthetic construct
  source 1..50: mol_type = other DNA
aaccccaaccaactcaaccattcataaataaatataaaaaacaaactaca

SEQ ID NO: 51850 - DNA, 50 bp, synthetic construct
  source 1..50: mol_type = other DNA
aaccccgaccaactcaaccgttcataaataaatataaaaaacaaactacg

SEQ ID NO: 51851 - DNA, 50 bp, synthetic construct
  source 1..50: mol_type = other DNA
tctctccactataacaccaaataataccttttaaaacctctctaatccca

SEQ ID NO: 51852 - DNA, 50 bp, synthetic construct
  source 1..50: mol_type = other DNA
tctctccgctataacgccgaataataccttttaaaacctctctaatcccg

SEQ ID NO: 51853 - DNA, 50 bp, synthetic construct
  source 1..50: mol_type = other DNA
ttaaaaaaacaaaataaaccaaaacccaaatacaccctaaaaaaattaca

SEQ ID NO: 51854 - DNA, 50 bp, synthetic construct
  source 1..50: mol_type = other DNA
ttaaaaaaacaaaataaaccaaaacccaaatacgccctaaaaaaattacg

SEQ ID NO: 51855 - DNA, 50 bp, synthetic construct
  source 1..50: mol_type = other DNA
aaactaaaaacaccaaaatacaataaaaaaaactctatccaaaaaaacca

SEQ ID NO: 51856 - DNA, 50 bp, synthetic construct
  source 1..50: mol_type = other DNA
aaactaaaaacaccgaaatacgataaaaaaaactctatccaaaaaaaccg

SEQ ID NO: 51857 - DNA, 50 bp, synthetic construct
  source 1..50: mol_type = other DNA
aaaaacactaaaaatataaccaaaaaccaatataaaatccaaaaaaacca

SEQ ID NO: 51858 - DNA, 50 bp, synthetic construct
  source 1..50: mol_type = other DNA
aaaaacgctaaaaatataaccaaaaaccgatataaaatccgaaaaaaccg

SEQ ID NO: 51859 - DNA, 50 bp, synthetic construct
  source 1..50: mol_type = other DNA
aaaaaaattaacaaacataccaaaaaaaaacaaacctaaccaccaaaaca

SEQ ID NO: 51860 - DNA, 50 bp, synthetic construct
  source 1..50: mol_type = other DNA
aaaaaaattaacaaacgtaccgaaaaaaaacaaacctaaccgccgaaacg

SEQ ID NO: 51861 - DNA, 50 bp, synthetic construct
  source 1..50: mol_type = other DNA
aacacaccaacttctcctcaaaacaaaacaaacaataaataacttcatca

SEQ ID NO: 51862 - DNA, 50 bp, synthetic construct
  source 1..50: mol_type = other DNA
aacgcgccaacttctcctcgaaacaaaacgaacaataaataacttcgtcg

SEQ ID NO: 51863 - DNA, 50 bp, synthetic construct
  source 1..50: mol_type = other DNA
aacaacacaccaacttctcctcaaaacaaaacaaacaataaataacttca

SEQ ID NO: 51864 - DNA, 50 bp, synthetic construct
  source 1..50: mol_type = other DNA
gacaacgcgccaacttctcctcgaaacaaaacgaacaataaataacttcg

SEQ ID NO: 51865 - DNA, 50 bp, synthetic construct
  source 1..50: mol_type = other DNA
aaaaaatatacaccccacaaaacatccccaaacccaaaacacaaataaca

SEQ ID NO: 51866 - DNA, 50 bp, synthetic construct
  source 1..50: mol_type = other DNA
gaaaaatatacaccccgcaaaacatccccaaacccaaaacgcaaataacg

SEQ ID NO: 51867 - DNA, 50 bp, synthetic construct
  source 1..50: mol_type = other DNA
ctacaaaaaactaatacaaaaaccaaactacaactattacaccacttaca

SEQ ID NO: 51868 - DNA, 50 bp, synthetic construct
  source 1..50: mol_type = other DNA
ctacgaaaaactaatacgaaaaccgaactacgactattacgccacttacg

SEQ ID NO: 51869 - DNA, 50 bp, synthetic construct
  source 1..50: mol_type = other DNA
aaattcaaaaaaaacataactctattataccccacaaacccaaaaactca

SEQ ID NO: 51870 - DNA, 50 bp, synthetic construct
  source 1..50: mol_type = other DNA
aaattcaaaaaaaacgtaactctattataccccgcgaacccaaaaactcg

SEQ ID NO: 51871 - DNA, 50 bp, synthetic construct
  source 1..50: mol_type = other DNA
aaaaaaacaaaaaccaaacccttaaattcacaaaatacaacaaaatcaca

SEQ ID NO: 51872 - DNA, 50 bp, synthetic construct
  source 1..50: mol_type = other DNA
aaaaaaacaaaaaccgaacccttaaattcgcgaaatacaacaaaatcacg

SEQ ID NO: 51873 - DNA, 50 bp, synthetic construct
  source 1..50: mol_type = other DNA
aaaaaaaaaaccacacaactttaacaccaccaactacaaaatttataaca

SEQ ID NO: 51874 - DNA, 50 bp, synthetic construct
  source 1..50: mol_type = other DNA
aaaaaaaaaaccacacgactttaacaccaccgactacaaaatttataacg

SEQ ID NO: 51875 - DNA, 50 bp, synthetic construct
  source 1..50: mol_type = other DNA
tttaataaaactccccaacctccaaactcccccaaaataaaaaaccaaca

SEQ ID NO: 51876 - DNA, 50 bp, synthetic construct
  source 1..50: mol_type = other DNA
tttaataaaactccccaacctccaaactcccccgaaataaaaaaccaacg

SEQ ID NO: 51877 - DNA, 50 bp, synthetic construct
  source 1..50: mol_type = other DNA
aaatacattcaaataaaattccaccttataaccaaacacaataactcaca

SEQ ID NO: 51878 - DNA, 50 bp, synthetic construct
  source 1..50: mol_type = other DNA
aaatacattcgaataaaattccaccttataaccgaacgcgataactcacg

SEQ ID NO: 51879 - DNA, 50 bp, synthetic construct
  source 1..50: mol_type = other DNA
ccttaatacctataaacatcataaccaaataaaaactaaaaaacccccca

SEQ ID NO: 51880 - DNA, 50 bp, synthetic construct
  source 1..50: mol_type = other DNA
ccttaatacctataaacgtcataaccaaataaaaactaaaaaaccccccg

SEQ ID NO: 51881 - DNA, 50 bp, synthetic construct
  source 1..50: mol_type = other DNA
acctataaacatcataaccaaataaaaactaaaaaaccccccaataacca

SEQ ID NO: 51882 - DNA, 50 bp, synthetic construct
  source 1..50: mol_type = other DNA
acctataaacgtcataaccaaataaaaactaaaaaaccccccgataaccg

SEQ ID NO: 51883 - DNA, 50 bp, synthetic construct
  source 1..50: mol_type = other DNA
tcccaaaaaaaataaaactctcactactacttcatatctctcaaaaaaca

SEQ ID NO: 51884 - DNA, 50 bp, synthetic construct
  source 1..50: mol_type = other DNA
tcccaaaaaaaataaaactctcactactacttcgtatctctcgaaaaacg

SEQ ID NO: 51885 - DNA, 50 bp, synthetic construct
  source 1..50: mol_type = other DNA
aatatccctctacacttaaattccatataacattataacaaaacaaacca

SEQ ID NO: 51886 - DNA, 50 bp, synthetic construct
  source 1..50: mol_type = other DNA
aatatccctctacacttaaattccatataacattataacaaaacgaaccg

SEQ ID NO: 51887 - DNA, 50 bp, synthetic construct
  source 1..50: mol_type = other DNA
ttgtaggatttggttaaggaaaagtttggtattagatttattggagttat

SEQ ID NO: 51888 - DNA, 50 bp, synthetic construct
  source 1..50: mol_type = other DNA
ttgtaggatttggttaaggaaaagtttggtattagatttatcggagttac

SEQ ID NO: 51889 - DNA, 50 bp, synthetic construct
  source 1..50: mol_type = other DNA
aaaacacaaaaaccaactcccttccacttccatttataaaaaacttccca

SEQ ID NO: 51890 - DNA, 50 bp, synthetic construct
  source 1..50: mol_type = other DNA
aaaacgcaaaaaccgactcccttccacttccatttataaaaaacttcccg

SEQ ID NO: 51891 - DNA, 50 bp, synthetic construct
  source 1..50: mol_type = other DNA
aaccataattccaactctatatcctcaactatcccaaaaaaacaaaaaca

SEQ ID NO: 51892 - DNA, 50 bp, synthetic construct
  source 1..50: mol_type = other DNA
aaccgtaattccgactctatatcctcaactatcccgaaaaaacgaaaacg

SEQ ID NO: 51893 - DNA, 50 bp, synthetic construct
  source 1..50: mol_type = other DNA
aaaaaaaaccataattccaactctatatcctcaactatcccaaaaaaaca

SEQ ID NO: 51894 - DNA, 50 bp, synthetic construct
  source 1..50: mol_type = other DNA
aaaaaaaaccgtaattccgactctatatcctcaactatcccgaaaaaacg

SEQ ID NO: 51895 - DNA, 50 bp, synthetic construct
  source 1..50: mol_type = other DNA
actctaaaaaaacaaaaacttcctattcctataacaaaataccataaaca

SEQ ID NO: 51896 - DNA, 50 bp, synthetic construct
  source 1..50: mol_type = other DNA
actctaaaaaaacgaaaacttcctattcctataacaaaataccataaacg

SEQ ID NO: 51897 - DNA, 50 bp, synthetic construct
  source 1..50: mol_type = other DNA
atcaaaaacccaaattaaattcctaaaacctccctaaataaacaccacca

SEQ ID NO: 51898 - DNA, 50 bp, synthetic construct
  source 1..50: mol_type = other DNA
atcaaaaacccgaattaaattcctaaaacctccctaaataaacaccgccg

SEQ ID NO: 51899 - DNA, 50 bp, synthetic construct
  source 1..50: mol_type = other DNA
ttaacaaacaaaacaacaataaactttaaaaacaaaataccaaaaaaaca

SEQ ID NO: 51900 - DNA, 50 bp, synthetic construct
  source 1..50: mol_type = other DNA
ttaacgaacgaaacaacgataaactttaaaaacaaaataccaaaaaaacg

SEQ ID NO: 51901 - DNA, 50 bp, synthetic construct
  source 1..50: mol_type = other DNA
attatctaaacctccataaaaaaacaaccataaaaacaaaaacaaaaaca

SEQ ID NO: 51902 - DNA, 50 bp, synthetic construct
  source 1..50: mol_type = other DNA
attatctaaacctccgtaaaaaaacaaccgtaaaaacaaaaacaaaaacg

SEQ ID NO: 51903 - DNA, 50 bp, synthetic construct
  source 1..50: mol_type = other DNA
ccaatactaaaaaatcacctatataaaaaccaactctacctcctacccca

SEQ ID NO: 51904 - DNA, 50 bp, synthetic construct
  source 1..50: mol_type = other DNA
ccgatactaaaaaatcacctatataaaaaccaactctacctcctaccccg

SEQ ID NO: 51905 - DNA, 50 bp, synthetic construct
  source 1..50: mol_type = other DNA
tcaactaatctcatacaaaatcaaaaacaccaaaatatatattccccaca

SEQ ID NO: 51906 - DNA, 50 bp, synthetic construct
  source 1..50: mol_type = other DNA
tcaactaatctcgtacgaaatcaaaaacgccaaaatatatattccccacg

SEQ ID NO: 51907 - DNA, 50 bp, synthetic construct
  source 1..50: mol_type = other DNA
taaaacaacatttacaacaataacattaaatattaaaaaacacaactaca

SEQ ID NO: 51908 - DNA, 50 bp, synthetic construct
  source 1..50: mol_type = other DNA
taaaacgacgtttacaacaataacattaaatattaaaaaacacaactacg

SEQ ID NO: 51909 - DNA, 50 bp, synthetic construct
  source 1..50: mol_type = other DNA
aaacaaaaaacaaactcataaaccttaaacaaccactatcaccctcccca

SEQ ID NO: 51910 - DNA, 50 bp, synthetic construct
  source 1..50: mol_type = other DNA
aaacaaaaaacaaactcgtaaaccttaaacgaccactatcaccctccccg

SEQ ID NO: 51911 - DNA, 50 bp, synthetic construct
  source 1..50: mol_type = other DNA
tacaaaaaacaccacactctcccctattaaaaacctaaaaaaacaacaca

SEQ ID NO: 51912 - DNA, 50 bp, synthetic construct
  source 1..50: mol_type = other DNA
tacaaaaaacaccacactctcccctattaaaaacctaaaaaaacgacgcg

SEQ ID NO: 51913 - DNA, 50 bp, synthetic construct
  source 1..50: mol_type = other DNA
ctaaaataaccaaaaaacacttacatattttaaaaaaacctcaaaactca

SEQ ID NO: 51914 - DNA, 50 bp, synthetic construct
  source 1..50: mol_type = other DNA
ctaaaataaccgaaaaacacttacgtattttaaaaaaacctcgaaactcg

SEQ ID NO: 51915 - DNA, 50 bp, synthetic construct
  source 1..50: mol_type = other DNA
aaccccaccactctcttatatccctactattttaaaaaaacataatctca

SEQ ID NO: 51916 - DNA, 50 bp, synthetic construct
  source 1..50: mol_type = other DNA
aaccccgccactctcttatatccctactattttaaaaaaacataatctcg

SEQ ID NO: 51917 - DNA, 50 bp, synthetic construct
  source 1..50: mol_type = other DNA
accaaatcaaaactaatttctccaaaaaacacccctatacactccaccca

SEQ ID NO: 51918 - DNA, 50 bp, synthetic construct
  source 1..50: mol_type = other DNA
accaaatcaaaactaatttctccaaaaaacacccctatacgctccacccg

SEQ ID NO: 51919 - DNA, 50 bp, synthetic construct
  source 1..50: mol_type = other DNA
ttttagtatttttggaggttaaggtgggtagattatgaagttaggagatt

SEQ ID NO: 51920 - DNA, 50 bp, synthetic construct
  source 1..50: mol_type = other DNA
ttttagtattttcggaggttaaggcgggtagattatgaagttaggagatc

SEQ ID NO: 51921 - DNA, 50 bp, synthetic construct
  source 1..50: mol_type = other DNA
aaccaaatcaataaatacaaatcataatatccccacttaactaaacccca

SEQ ID NO: 51922 - DNA, 50 bp, synthetic construct
  source 1..50: mol_type = other DNA
aaccgaatcgataaatacaaatcgtaatatccccgcttaactaaaccccg

SEQ ID NO: 51923 - DNA, 50 bp, synthetic construct
  source 1..50: mol_type = other DNA
acaaataaatatttccaaataaaacaaaccaaatcaataaatacaaatca

SEQ ID NO: 51924 - DNA, 50 bp, synthetic construct
  source 1..50: mol_type = other DNA
gcgaataaatatttccaaataaaacgaaccgaatcgataaatacaaatcg

SEQ ID NO: 51925 - DNA, 50 bp, synthetic construct
  source 1..50: mol_type = other DNA
cactttttctacccacaaataaatatttccaaataaaacaaaccaaatca

SEQ ID NO: 51926 - DNA, 50 bp, synthetic construct
  source 1..50: mol_type = other DNA
cgctttttctacccgcgaataaatatttccaaataaaacgaaccgaatcg

SEQ ID NO: 51927 - DNA, 50 bp, synthetic construct
  source 1..50: mol_type = other DNA
acaaacactttttctacccacaaataaatatttccaaataaaacaaacca

SEQ ID NO: 51928 - DNA, 50 bp, synthetic construct
  source 1..50: mol_type = other DNA
acgaacgctttttctacccgcgaataaatatttccaaataaaacgaaccg

SEQ ID NO: 51929 - DNA, 50 bp, synthetic construct
  source 1..50: mol_type = other DNA
aaactacaaacactttttctacccacaaataaatatttccaaataaaaca

SEQ ID NO: 51930 - DNA, 50 bp, synthetic construct
  source 1..50: mol_type = other DNA
aaactacgaacgctttttctacccgcgaataaatatttccaaataaaacg

SEQ ID NO: 51931 - DNA, 50 bp, synthetic construct
  source 1..50: mol_type = other DNA
caaaataaacctaaatttaacaactataaaaaaccaaaaccaccacaaca

SEQ ID NO: 51932 - DNA, 50 bp, synthetic construct
  source 1..50: mol_type = other DNA
caaaataaacctaaatttaacgactataaaaaaccgaaaccgccgcaacg

SEQ ID NO: 51933 - DNA, 50 bp, synthetic construct
  source 1..50: mol_type = other DNA
ataaacctaaatttaacaactataaaaaaccaaaaccaccacaacaacca

SEQ ID NO: 51934 - DNA, 50 bp, synthetic construct
  source 1..50: mol_type = other DNA
ataaacctaaatttaacgactataaaaaaccgaaaccgccgcaacgaccg

SEQ ID NO: 51935 - DNA, 50 bp, synthetic construct
  source 1..50: mol_type = other DNA
tttaacaactataaaaaaccaaaaccaccacaacaaccaaaaaaataaca

SEQ ID NO: 51936 - DNA, 50 bp, synthetic construct
  source 1..50: mol_type = other DNA
tttaacgactataaaaaaccgaaaccgccgcaacgaccgaaaaaataacg

SEQ ID NO: 51937 - DNA, 50 bp, synthetic construct
  source 1..50: mol_type = other DNA
ataaaaaaccaaaaccaccacaacaaccaaaaaaataacaaaaaatacca

SEQ ID NO: 51938 - DNA, 50 bp, synthetic construct
  source 1..50: mol_type = other DNA
ataaaaaaccgaaaccgccgcaacgaccgaaaaaataacgaaaaataccg

SEQ ID NO: 51939 - DNA, 50 bp, synthetic construct
  source 1..50: mol_type = other DNA
ccacaacaaccaaaaaaataacaaaaaataccaaaccttacaaaaaaaca

SEQ ID NO: 51940 - DNA, 50 bp, synthetic construct
  source 1..50: mol_type = other DNA
ccgcaacgaccgaaaaaataacgaaaaataccgaaccttacgaaaaaacg

SEQ ID NO: 51941 - DNA, 50 bp, synthetic construct
  source 1..50: mol_type = other DNA
caaaaaaataacaaaaaataccaaaccttacaaaaaaacaataaaaacca

SEQ ID NO: 51942 - DNA, 50 bp, synthetic construct
  source 1..50: mol_type = other DNA
cgaaaaaataacgaaaaataccgaaccttacgaaaaaacgataaaaaccg

SEQ ID NO: 51943 - DNA, 50 bp, synthetic construct
  source 1..50: mol_type = other DNA
aaaaaataccaaaccttacaaaaaaacaataaaaaccacaataaaaaaca

SEQ ID NO: 51944 - DNA, 50 bp, synthetic construct
  source 1..50: mol_type = other DNA
gaaaaataccgaaccttacgaaaaaacgataaaaaccgcgataaaaaacg

SEQ ID NO: 51945 - DNA, 50 bp, synthetic construct
  source 1..50: mol_type = other DNA
aaaaaaacaataaaaaccacaataaaaaacaacaaataacactcaacaca

SEQ ID NO: 51946 - DNA, 50 bp, synthetic construct
  source 1..50: mol_type = other DNA
gaaaaaacgataaaaaccgcgataaaaaacgacgaataacgctcaacgcg

SEQ ID NO: 51947 - DNA, 50 bp, synthetic construct
  source 1..50: mol_type = other DNA
acaaactcaacaaaaatctaaccaaactacttactaccacaataattcca

SEQ ID NO: 51948 - DNA, 50 bp, synthetic construct
  source 1..50: mol_type = other DNA
acgaactcaacgaaaatctaaccgaactacttactaccacaataattccg

SEQ ID NO: 51949 - DNA, 50 bp, synthetic construct
  source 1..50: mol_type = other DNA
caaaatcaaaaaaaacccctccaaaaacaaactcaacaaaaatctaacca

SEQ ID NO: 51950 - DNA, 50 bp, synthetic construct
  source 1..50: mol_type = other DNA
cgaaatcgaaaaaaacccctccaaaaacgaactcaacgaaaatctaaccg

SEQ ID NO: 51951 - DNA, 50 bp, synthetic construct
  source 1..50: mol_type = other DNA
aaaaaacaaaaccaaaatcaaaaaaaacccctccaaaaacaaactcaaca

SEQ ID NO: 51952 - DNA, 50 bp, synthetic construct
  source 1..50: mol_type = other DNA
aaaaaacaaaaccgaaatcgaaaaaaacccctccaaaaacgaactcaacg

SEQ ID NO: 51953 - DNA, 50 bp, synthetic construct
  source 1..50: mol_type = other DNA
tcactaaacctaaaataaaaacataaaaaacttacttcacaacatttaca

SEQ ID NO: 51954 - DNA, 50 bp, synthetic construct
  source 1..50: mol_type = other DNA
tcactaaacctaaaataaaaacgtaaaaaacttacttcgcgacgtttacg

SEQ ID NO: 51955 - DNA, 50 bp, synthetic construct
  source 1..50: mol_type = other DNA
aacctaaaataaaaacataaaaaacttacttcacaacatttacatcctca

SEQ ID NO: 51956 - DNA, 50 bp, synthetic construct
  source 1..50: mol_type = other DNA
aacctaaaataaaaacgtaaaaaacttacttcgcgacgtttacgtcctcg

SEQ ID NO: 51957 - DNA, 50 bp, synthetic construct
  source 1..50: mol_type = other DNA
aaataaaaacataaaaaacttacttcacaacatttacatcctcacaaaca

SEQ ID NO: 51958 - DNA, 50 bp, synthetic construct
  source 1..50: mol_type = other DNA
aaataaaaacgtaaaaaacttacttcgcgacgtttacgtcctcgcaaacg

SEQ ID NO: 51959 - DNA, 50 bp, synthetic construct
  source 1..50: mol_type = other DNA
aaaaaactacaaaactcatactaattttcaccaaaactactcccccacca

SEQ ID NO: 51960 - DNA, 50 bp, synthetic construct
  source 1..50: mol_type = other DNA
aaaaaactacaaaactcgtactaattttcgccaaaactactcccccgccg

SEQ ID NO: 51961 - DNA, 50 bp, synthetic construct
  source 1..50: mol_type = other DNA
aaaaccaaaaaaaccaaaacaacactaaaacaaaaaccaaataacaccca

SEQ ID NO: 51962 - DNA, 50 bp, synthetic construct
  source 1..50: mol_type = other DNA
aaaaccgaaaaaaccgaaacaacgctaaaacgaaaaccaaataacacccg

SEQ ID NO: 51963 - DNA, 50 bp, synthetic construct
  source 1..50: mol_type = other DNA
aataaaaacaatcattcccactaataaaaaccaaaaaaaccaaaacaaca

SEQ ID NO: 51964 - DNA, 50 bp, synthetic construct
  source 1..50: mol_type = other DNA
aataaaaacgatcgttcccgctaataaaaaccgaaaaaaccgaaacaacg

SEQ ID NO: 51965 - DNA, 50 bp, synthetic construct
  source 1..50: mol_type = other DNA
aataaatttaaactaaaaataaaaacaatcattcccactaataaaaacca

SEQ ID NO: 51966 - DNA, 50 bp, synthetic construct
  source 1..50: mol_type = other DNA
aataaatttaaactaaaaataaaaacgatcgttcccgctaataaaaaccg

SEQ ID NO: 51967 - DNA, 50 bp, synthetic construct
  source 1..50: mol_type = other DNA
atctactaaaaacacacacacaaaaaaaattaaccaaacataataacaca

SEQ ID NO: 51968 - DNA, 50 bp, synthetic construct
  source 1..50: mol_type = other DNA
atctactaaaaacacacacacaaaaaaaattaaccgaacataataacacg

SEQ ID NO: 51969 - DNA, 50 bp, synthetic construct
  source 1..50: mol_type = other DNA
ccaatttcccaaacttaaaacaacaacaactcccactattctcccaaaca

SEQ ID NO: 51970 - DNA, 50 bp, synthetic construct
  source 1..50: mol_type = other DNA
ccaatttcccaaacttaaaacgacaacaactcccactattctcccaaacg

SEQ ID NO: 51971 - DNA, 50 bp, synthetic construct
  source 1..50: mol_type = other DNA
ataaactaaccaaatcctcctaaacaaacaaataacaactaacccaacca

SEQ ID NO: 51972 - DNA, 50 bp, synthetic construct
  source 1..50: mol_type = other DNA
ataaactaaccaaatcctcctaaacaaacgaataacgactaacccgaccg

SEQ ID NO: 51973 - DNA, 50 bp, synthetic construct
  source 1..50: mol_type = other DNA
aaaaaaatccaaattaactaccaaaaaaactaaaaacaatacaaaataca

SEQ ID NO: 51974 - DNA, 50 bp, synthetic construct
  source 1..50: mol_type = other DNA
aaaaaaatccgaattaactaccgaaaaaactaaaaacaatacgaaatacg

SEQ ID NO: 51975 - DNA, 50 bp, synthetic construct
  source 1..50: mol_type = other DNA
ataaaaactacaaaacaaaccctaaacccaaaaccaaaaaaaccaaacca

SEQ ID NO: 51976 - DNA, 50 bp, synthetic construct
  source 1..50: mol_type = other DNA
ataaaaactacgaaacgaaccctaaacccgaaaccgaaaaaaccaaaccg

SEQ ID NO: 51977 - DNA, 50 bp, synthetic construct
  source 1..50: mol_type = other DNA
aaaaaccaaacaaaataaaaactacaaaacaaaccctaaacccaaaacca

SEQ ID NO: 51978 - DNA, 50 bp, synthetic construct
  source 1..50: mol_type = other DNA
aaaaaccgaacgaaataaaaactacgaaacgaaccctaaacccgaaaccg

SEQ ID NO: 51979 - DNA, 50 bp, synthetic construct
  source 1..50: mol_type = other DNA
atataccaaaaaaatccaaatccttcaaaaacaatcacaaaaaaaacaca

SEQ ID NO: 51980 - DNA, 50 bp, synthetic construct
  source 1..50: mol_type = other DNA
atataccgaaaaaatccgaatccttcaaaaacgatcgcgaaaaaaacgcg

SEQ ID NO: 51981 - DNA, 50 bp, synthetic construct
  source 1..50: mol_type = other DNA
aacaaaacaacatatacttacaatacaacatcaactaaaaaaccaaacca

SEQ ID NO: 51982 - DNA, 50 bp, synthetic construct
  source 1..50: mol_type = other DNA
aacaaaacaacatatacttacgatacgacgtcgactaaaaaaccgaaccg

SEQ ID NO: 51983 - DNA, 50 bp, synthetic construct
  source 1..50: mol_type = other DNA
acccaaacaaaacaacatatacttacaatacaacatcaactaaaaaacca

SEQ ID NO: 51984 - DNA, 50 bp, synthetic construct
  source 1..50: mol_type = other DNA
acccaaacaaaacaacatatacttacgatacgacgtcgactaaaaaaccg

SEQ ID NO: 51985 - DNA, 50 bp, synthetic construct
  source 1..50: mol_type = other DNA
ctaaccaacaccacaccacaaacacatactactttatttaaattaaatca

SEQ ID NO: 51986 - DNA, 50 bp, synthetic construct
  source 1..50: mol_type = other DNA
ctaaccgacgccgcaccgcaaacacatactactttatttaaattaaatcg

SEQ ID NO: 51987 - DNA, 50 bp, synthetic construct
  source 1..50: mol_type = other DNA
ctaacaaaactaaaacacactatcataatcattttaattaaccccctcca

SEQ ID NO: 51988 - DNA, 50 bp, synthetic construct
  source 1..50: mol_type = other DNA
ctaacaaaactaaaacgcactatcgtaatcgttttaattaaccccctccg

SEQ ID NO: 51989 - DNA, 50 bp, synthetic construct
  source 1..50: mol_type = other DNA
aaataattattaatcaaaacccctataaacttctaacctcaacctcaaca

SEQ ID NO: 51990 - DNA, 50 bp, synthetic construct
  source 1..50: mol_type = other DNA
aaataattattaatcgaaacccctataaacttctaacctcgacctcgacg

SEQ ID NO: 51991 - DNA, 50 bp, synthetic construct
  source 1..50: mol_type = other DNA
cccaaaccaaattcacctatccaaattccaaaataaacctacaaaaaaca

SEQ ID NO: 51992 - DNA, 50 bp, synthetic construct
  source 1..50: mol_type = other DNA
cccaaaccgaattcacctatccgaattccaaaataaacctacgaaaaacg

SEQ ID NO: 51993 - DNA, 50 bp, synthetic construct
  source 1..50: mol_type = other DNA
taaacattttacatacacacaaaaaaactctatatatctaaataaaaaca

SEQ ID NO: 51994 - DNA, 50 bp, synthetic construct
  source 1..50: mol_type = other DNA
taaacgttttacatacacacaaaaaaactctatatatctaaataaaaacg

SEQ ID NO: 51995 - DNA, 50 bp, synthetic construct
  source 1..50: mol_type = other DNA
aatcaatccccaacactacaaaaaaattaacccaacacaaacaaaaaaca

SEQ ID NO: 51996 - DNA, 50 bp, synthetic construct
  source 1..50: mol_type = other DNA
aatcaatccccgacactacgaaaaaattaacccaacgcaaacgaaaaacg

SEQ ID NO: 51997 - DNA, 50 bp, synthetic construct
  source 1..50: mol_type = other DNA
ataacactaacctaacttcaaattaaaatatctccccttcccaaaaacca

SEQ ID NO: 51998 - DNA, 50 bp, synthetic construct
  source 1..50: mol_type = other DNA
gtaacgctaacctaacttcgaattaaaatatctccccttcccaaaaaccg

SEQ ID NO: 51999 - DNA, 50 bp, synthetic construct
  source 1..50: mol_type = other DNA
ccaaaaacaaacccaattccttaacctctacaaaaaaaaacacttcaaca

SEQ ID NO: 52000 - DNA, 50 bp, synthetic construct
  source 1..50: mol_type = other DNA
ccaaaaacaaacccgattccttaacctctacaaaaaaaaacgcttcaacg

SEQ ID NO: 52001 - DNA, 50 bp, synthetic construct
  source 1..50: mol_type = other DNA
taccaaacctcaataaaaaaatactaaccatacaacacctacatctaaca

SEQ ID NO: 52002 - DNA, 50 bp, synthetic construct
  source 1..50: mol_type = other DNA
taccgaacctcgataaaaaaatactaaccgtacaacacctacatctaacg

SEQ ID NO: 52003 - DNA, 50 bp, synthetic construct
  source 1..50: mol_type = other DNA
cctaccataactaactctcaatccactaaaccaaataataccaaacctca

SEQ ID NO: 52004 - DNA, 50 bp, synthetic construct
  source 1..50: mol_type = other DNA
cctaccataactaactctcaatccactaaaccaaataataccgaacctcg

SEQ ID NO: 52005 - DNA, 50 bp, synthetic construct
  source 1..50: mol_type = other DNA
tgttatgtaaataattaatgagaataaaggaaaatgagagttttatatat

SEQ ID NO: 52006 - DNA, 50 bp, synthetic construct
  source 1..50: mol_type = other DNA
tgttatgtaaataattaacgagaataaaggaaaatgagagttttatatac

SEQ ID NO: 52007 - DNA, 50 bp, synthetic construct
  source 1..50: mol_type = other DNA
aacaaacacttaatacctacaaaaaccaaataaaaaacataaaaaaaaca

SEQ ID NO: 52008 - DNA, 50 bp, synthetic construct
  source 1..50: mol_type = other DNA
aacgaacacttaatacctacaaaaaccaaataaaaaacataaaaaaaacg

SEQ ID NO: 52009 - DNA, 50 bp, synthetic construct
  source 1..50: mol_type = other DNA
tacaaaaaactctaaacaaaacaaaccccaataactcacccccatttcca

SEQ ID NO: 52010 - DNA, 50 bp, synthetic construct
  source 1..50: mol_type = other DNA
tacaaaaaactctaaacaaaacaaaccccgataactcacccccatttccg

SEQ ID NO: 52011 - DNA, 50 bp, synthetic construct
  source 1..50: mol_type = other DNA
tttccaaataaccaaaactataaaactctaaaaaaaaacacacaataaca

SEQ ID NO: 52012 - DNA, 50 bp, synthetic construct
  source 1..50: mol_type = other DNA
tttccaaataaccgaaactataaaactctaaaaaaaaacacacaataacg

SEQ ID NO: 52013 - DNA, 50 bp, synthetic construct
  source 1..50: mol_type = other DNA
aaaatccataacattccttaaaaaatcaacaaaatcaaaaaaaacaaaca

SEQ ID NO: 52014 - DNA, 50 bp, synthetic construct
  source 1..50: mol_type = other DNA
aaaatccataacattccttaaaaaatcaacaaaatcaaaaaaaacaaacg

SEQ ID NO: 52015 - DNA, 50 bp, synthetic construct
  source 1..50: mol_type = other DNA
taaaaaatcaacaaaatcaaaaaaaacaaacaatacttcccttaacccca

SEQ ID NO: 52016 - DNA, 50 bp, synthetic construct
  source 1..50: mol_type = other DNA
taaaaaatcaacaaaatcaaaaaaaacaaacgatacttcccttaaccccg

SEQ ID NO: 52017 - DNA, 50 bp, synthetic construct
  source 1..50: mol_type = other DNA
taacaaatatcctaaattttctctaaccaccctatatccccacaacccca

SEQ ID NO: 52018 - DNA, 50 bp, synthetic construct
  source 1..50: mol_type = other DNA
taacgaatatcctaaattttctctaaccaccctatatccccacaaccccg

SEQ ID NO: 52019 - DNA, 50 bp, synthetic construct
  source 1..50: mol_type = other DNA
acccccaaaaacatcctcacaaaactaccaaataaaatacaaaacaccca

SEQ ID NO: 52020 - DNA, 50 bp, synthetic construct
  source 1..50: mol_type = other DNA
acccccaaaaacgtcctcacaaaactaccaaataaaatacaaaacacccg

SEQ ID NO: 52021 - DNA, 50 bp, synthetic construct
  source 1..50: mol_type = other DNA
ctcactaaactctaacactcctctctcttcaataattccctacaaatcca

SEQ ID NO: 52022 - DNA, 50 bp, synthetic construct
  source 1..50: mol_type = other DNA
ctcactaaactctaacgctcctctctcttcaataattccctacaaatccg

SEQ ID NO: 52023 - DNA, 50 bp, synthetic construct
  source 1..50: mol_type = other DNA
aaaaaaaccccatacccattaacctcttcatcccacacatttactaaaca

SEQ ID NO: 52024 - DNA, 50 bp, synthetic construct
  source 1..50: mol_type = other DNA
aaaaaaaccccatacccattaacctcttcatcccacacgtttactaaacg

SEQ ID NO: 52025 - DNA, 50 bp, synthetic construct
  source 1..50: mol_type = other DNA
ataaaataaaaaaaccaataaacataaaacctcccctcaacccttccaca

SEQ ID NO: 52026 - DNA, 50 bp, synthetic construct
  source 1..50: mol_type = other DNA
ataaaataaaaaaaccaataaacataaaacctcccctcaacccttccgcg

SEQ ID NO: 52027 - DNA, 50 bp, synthetic construct
  source 1..50: mol_type = other DNA
actaaaaatcacacctaaaatcatccaaaaatcccaaaacaaaccaaaca

SEQ ID NO: 52028 - DNA, 50 bp, synthetic construct
  source 1..50: mol_type = other DNA
actaaaaatcgcacctaaaatcatccgaaaatcccgaaacgaaccgaacg

SEQ ID NO: 52029 - DNA, 50 bp, synthetic construct
  source 1..50: mol_type = other DNA
aaacaaaaaaccaactccctccaactaaaaatcacacctaaaatcatcca

SEQ ID NO: 52030 - DNA, 50 bp, synthetic construct
  source 1..50: mol_type = other DNA
aaacgaaaaaccaactccctccaactaaaaatcgcacctaaaatcatccg

SEQ ID NO: 52031 - DNA, 50 bp, synthetic construct
  source 1..50: mol_type = other DNA
ccaatctaaaacactccaaaaaacaattcataaattccccaaactacaca

SEQ ID NO: 52032 - DNA, 50 bp, synthetic construct
  source 1..50: mol_type = other DNA
ccaatctaaaacgctccaaaaaacaattcgtaaattccccaaactacacg

SEQ ID NO: 52033 - DNA, 50 bp, synthetic construct
  source 1..50: mol_type = other DNA
aaaaacaataaaataaacacaaaccattcccaaaaacccaatctaaaaca

SEQ ID NO: 52034 - DNA, 50 bp, synthetic construct
  source 1..50: mol_type = other DNA
aaaaacgataaaataaacgcgaaccgttcccaaaaacccaatctaaaacg

SEQ ID NO: 52035 - DNA, 50 bp, synthetic construct
  source 1..50: mol_type = other DNA
ccacaaaaataactaaaacccccatactacaaaactaaaaataaaaacca

SEQ ID NO: 52036 - DNA, 50 bp, synthetic construct
  source 1..50: mol_type = other DNA
ccgcaaaaataactaaaacccccatactacgaaactaaaaataaaaaccg

SEQ ID NO: 52037 - DNA, 50 bp, synthetic construct
  source 1..50: mol_type = other DNA
caaacctcaacaaaaaaccaaaaccaaaacaaaacacaaaaccaaaaaca

SEQ ID NO: 52038 - DNA, 50 bp, synthetic construct
  source 1..50: mol_type = other DNA
caaacctcaacaaaaaaccaaaaccgaaacaaaacgcaaaaccgaaaacg

SEQ ID NO: 52039 - DNA, 50 bp, synthetic construct
  source 1..50: mol_type = other DNA
aaaccaaaaccaaaacaaaacacaaaaccaaaaacaaaaacaaaacccca

SEQ ID NO: 52040 - DNA, 50 bp, synthetic construct
  source 1..50: mol_type = other DNA
aaaccaaaaccgaaacaaaacgcaaaaccgaaaacgaaaacaaaaccccg

SEQ ID NO: 52041 - DNA, 50 bp, synthetic construct
  source 1..50: mol_type = other DNA
aaacaaaacacaaaaccaaaaacaaaaacaaaaccccaaaaactaaacca

SEQ ID NO: 52042 - DNA, 50 bp, synthetic construct
  source 1..50: mol_type = other DNA
aaacaaaacgcaaaaccgaaaacgaaaacaaaaccccgaaaactaaaccg

SEQ ID NO: 52043 - DNA, 50 bp, synthetic construct
  source 1..50: mol_type = other DNA
taacatcataaaattaacctccctataccaaaccaaatactaccccctca

SEQ ID NO: 52044 - DNA, 50 bp, synthetic construct
  source 1..50: mol_type = other DNA
taacgtcataaaattaacctccctataccaaaccaaatactaccccctcg

SEQ ID NO: 52045 - DNA, 50 bp, synthetic construct
  source 1..50: mol_type = other DNA
actaccccctcaaaaaaccacaatctcaaaactaacaaacctaaaaaaca

SEQ ID NO: 52046 - DNA, 50 bp, synthetic construct
  source 1..50: mol_type = other DNA
actaccccctcgaaaaaccacaatctcgaaactaacgaacctaaaaaacg

SEQ ID NO: 52047 - DNA, 50 bp, synthetic construct
  source 1..50: mol_type = other DNA
cctcaaaaaaccacaatctcaaaactaacaaacctaaaaaacataaaaca

SEQ ID NO: 52048 - DNA, 50 bp, synthetic construct
  source 1..50: mol_type = other DNA
cctcgaaaaaccacaatctcgaaactaacgaacctaaaaaacgtaaaacg

SEQ ID NO: 52049 - DNA, 50 bp, synthetic construct
  source 1..50: mol_type = other DNA
aaaaccacaatctcaaaactaacaaacctaaaaaacataaaacaaaacca

SEQ ID NO: 52050 - DNA, 50 bp, synthetic construct
  source 1..50: mol_type = other DNA
aaaaccacaatctcgaaactaacgaacctaaaaaacgtaaaacgaaaccg

SEQ ID NO: 52051 - DNA, 50 bp, synthetic construct
  source 1..50: mol_type = other DNA
acataaaacaaaaccaaacctaaaatccccaacaactaattctaaattca

SEQ ID NO: 52052 - DNA, 50 bp, synthetic construct
  source 1..50: mol_type = other DNA
acgtaaaacgaaaccgaacctaaaatccccaacaactaattctaaattcg

SEQ ID NO: 52053 - DNA, 50 bp, synthetic construct
  source 1..50: mol_type = other DNA
caacaactaattctaaattcaaaacttaaacaaaccaacaccccaaccca

SEQ ID NO: 52054 - DNA, 50 bp, synthetic construct
  source 1..50: mol_type = other DNA
caacaactaattctaaattcgaaacttaaacaaaccgacaccccaacccg

SEQ ID NO: 52055 - DNA, 50 bp, synthetic construct
  source 1..50: mol_type = other DNA
catataaataataaatacacacccaactcaaccaccaaaacctacacaca

SEQ ID NO: 52056 - DNA, 50 bp, synthetic construct
  source 1..50: mol_type = other DNA
catataaataataaatacacacccgactcgaccaccaaaacctacacacg

SEQ ID NO: 52057 - DNA, 50 bp, synthetic construct
  source 1..50: mol_type = other DNA
cacacacactctaatacttacatataaataataaatacacacccaactca

SEQ ID NO: 52058 - DNA, 50 bp, synthetic construct
  source 1..50: mol_type = other DNA
cgcacgcactctaatacttacatataaataataaatacacacccgactcg

SEQ ID NO: 52059 - DNA, 50 bp, synthetic construct
  source 1..50: mol_type = other DNA
cttcacacacacactctaatacttacatataaataataaatacacaccca

SEQ ID NO: 52060 - DNA, 50 bp, synthetic construct
  source 1..50: mol_type = other DNA
cttcgcgcacgcactctaatacttacatataaataataaatacacacccg

SEQ ID NO: 52061 - DNA, 50 bp, synthetic construct
  source 1..50: mol_type = other DNA
tacaaacaccaaaatacatacacaaaataaaaaacatccaaataacaaca

SEQ ID NO: 52062 - DNA, 50 bp, synthetic construct
  source 1..50: mol_type = other DNA
tacaaacaccaaaatacgtacgcgaaataaaaaacgtccaaataacaacg

SEQ ID NO: 52063 - DNA, 50 bp, synthetic construct
  source 1..50: mol_type = other DNA
ccaaaatacatacacaaaataaaaaacatccaaataacaacatttctaca

SEQ ID NO: 52064 - DNA, 50 bp, synthetic construct
  source 1..50: mol_type = other DNA
ccaaaatacgtacgcgaaataaaaaacgtccaaataacaacgtttctacg

SEQ ID NO: 52065 - DNA, 50 bp, synthetic construct
  source 1..50: mol_type = other DNA
aatacatacacaaaataaaaaacatccaaataacaacatttctacaacca

SEQ ID NO: 52066 - DNA, 50 bp, synthetic construct
  source 1..50: mol_type = other DNA
aatacgtacgcgaaataaaaaacgtccaaataacaacgtttctacgaccg

SEQ ID NO: 52067 - DNA, 50 bp, synthetic construct
  source 1..50: mol_type = other DNA
ataaaaaacatccaaataacaacatttctacaaccaataacctaaatcca

SEQ ID NO: 52068 - DNA, 50 bp, synthetic construct
  source 1..50: mol_type = other DNA
ataaaaaacgtccaaataacaacgtttctacgaccgataacctaaatccg

SEQ ID NO: 52069 - DNA, 50 bp, synthetic construct
  source 1..50: mol_type = other DNA
aatcaaaccctaaacactaacctctctataaaataccacaccactaacca

SEQ ID NO: 52070 - DNA, 50 bp, synthetic construct
  source 1..50: mol_type = other DNA
aatcaaaccctaaacactaacctctctataaaataccacgccgctaaccg

SEQ ID NO: 52071 - DNA, 50 bp, synthetic construct
  source 1..50: mol_type = other DNA
aaaccacaaaataataacaaaaaaaaacccaaatatcctaacaataaaca

SEQ ID NO: 52072 - DNA, 50 bp, synthetic construct
  source 1..50: mol_type = other DNA
aaaccgcgaaataataacgaaaaaaaacccaaatatcctaacaataaacg

SEQ ID NO: 52073 - DNA, 50 bp, synthetic construct
  source 1..50: mol_type = other DNA
ccacaaaataataacaaaaaaaaacccaaatatcctaacaataaacacca

SEQ ID NO: 52074 - DNA, 50 bp, synthetic construct
  source 1..50: mol_type = other DNA
ccgcgaaataataacgaaaaaaaacccaaatatcctaacaataaacgccg

SEQ ID NO: 52075 - DNA, 50 bp, synthetic construct
  source 1..50: mol_type = other DNA
caaaatcaaaccccaaacatcctaaatacaaatccaaatacaaatcccca

SEQ ID NO: 52076 - DNA, 50 bp, synthetic construct
  source 1..50: mol_type = other DNA
caaaatcaaaccccaaacgtcctaaatacgaatccaaatacgaatccccg

SEQ ID NO: 52077 - DNA, 50 bp, synthetic construct
  source 1..50: mol_type = other DNA
caaattaaaacttaaaccaaaacctaaaaaaataattaactaaaaaacca

SEQ ID NO: 52078 - DNA, 50 bp, synthetic construct
  source 1..50: mol_type = other DNA
caaattaaaacttaaaccgaaacctaaaaaaataattaactaaaaaaccg

SEQ ID NO: 52079 - DNA, 50 bp, synthetic construct
  source 1..50: mol_type = other DNA
aattaaaacttaaaccaaaacctaaaaaaataattaactaaaaaaccaca

SEQ ID NO: 52080 - DNA, 50 bp, synthetic construct
  source 1..50: mol_type = other DNA
aattaaaacttaaaccgaaacctaaaaaaataattaactaaaaaaccgcg

SEQ ID NO: 52081 - DNA, 50 bp, synthetic construct
  source 1..50: mol_type = other DNA
tatttaataaaacattcctttataaataaatcttcaataaaaacatccca

SEQ ID NO: 52082 - DNA, 50 bp, synthetic construct
  source 1..50: mol_type = other DNA
tatttaataaaacattcctttataaataaatcttcaataaaaacgtcccg

SEQ ID NO: 52083 - DNA, 50 bp, synthetic construct
  source 1..50: mol_type = other DNA
aaaaaaccaaaaataacccaaactaaaaacaaaacacccttaaaaaaaca

SEQ ID NO: 52084 - DNA, 50 bp, synthetic construct
  source 1..50: mol_type = other DNA
aaaaaaccaaaaataacccgaactaaaaacgaaacgcccttaaaaaaacg

SEQ ID NO: 52085 - DNA, 50 bp, synthetic construct
  source 1..50: mol_type = other DNA
aaaacaaaacacccttaaaaaaacaaaaccaatacaaaaaaccaaaaaca

SEQ ID NO: 52086 - DNA, 50 bp, synthetic construct
  source 1..50: mol_type = other DNA
aaaacgaaacgcccttaaaaaaacgaaaccaatacgaaaaaccgaaaacg

SEQ ID NO: 52087 - DNA, 50 bp, synthetic construct
  source 1..50: mol_type = other DNA
aacaaaacacccttaaaaaaacaaaaccaatacaaaaaaccaaaaacaca

SEQ ID NO: 52088 - DNA, 50 bp, synthetic construct
  source 1..50: mol_type = other DNA
aacgaaacgcccttaaaaaaacgaaaccaatacgaaaaaccgaaaacgcg

SEQ ID NO: 52089 - DNA, 50 bp, synthetic construct
  source 1..50: mol_type = other DNA
aaaaacaacaaacatttctaaaaccaaaaactcaaaaccccatctctaca

SEQ ID NO: 52090 - DNA, 50 bp, synthetic construct
  source 1..50: mol_type = other DNA
aaaaacaacgaacatttctaaaaccgaaaactcgaaaccccatctctacg

SEQ ID NO: 52091 - DNA, 50 bp, synthetic construct
  source 1..50: mol_type = other DNA
aataaaaaacaaaaccctacacacctaaaaacccctatcaaaataaacca

SEQ ID NO: 52092 - DNA, 50 bp, synthetic construct
  source 1..50: mol_type = other DNA
aataaaaaacaaaaccctacgcgcctaaaaacccctatcgaaataaaccg

SEQ ID NO: 52093 - DNA, 50 bp, synthetic construct
  source 1..50: mol_type = other DNA
aaaaacaaaaccctacacacctaaaaacccctatcaaaataaaccaaaca

SEQ ID NO: 52094 - DNA, 50 bp, synthetic construct
  source 1..50: mol_type = other DNA
aaaaacaaaaccctacgcgcctaaaaacccctatcgaaataaaccgaacg

SEQ ID NO: 52095 - DNA, 50 bp, synthetic construct
  source 1..50: mol_type = other DNA
aaaataaaaaaatcctaaaacccaaataataacaacaacaaaaaactaca

SEQ ID NO: 52096 - DNA, 50 bp, synthetic construct
  source 1..50: mol_type = other DNA
aaaataaaaaaatcctaaaacccaaataataacaacgacgaaaaactacg

SEQ ID NO: 52097 - DNA, 50 bp, synthetic construct
  source 1..50: mol_type = other DNA
caaccattaataaaaaatcacacaactcactaaaaaaaaacaaccaatca

SEQ ID NO: 52098 - DNA, 50 bp, synthetic construct
  source 1..50: mol_type = other DNA
cgaccattaataaaaaatcacacgactcgctaaaaaaaaacgaccaatcg

SEQ ID NO: 52099 - DNA, 50 bp, synthetic construct
  source 1..50: mol_type = other DNA
aacaaaataatacaatccaaaacccaccccatcttctctacaattaacca

SEQ ID NO: 52100 - DNA, 50 bp, synthetic construct
  source 1..50: mol_type = other DNA
aacaaaataatacgatccaaaacccgccccatcttctctacgattaaccg

SEQ ID NO: 52101 - DNA, 50 bp, synthetic construct
  source 1..50: mol_type = other DNA
acctcactaaaaaaacacaaacaaccattaataaaaaatcacacaactca

SEQ ID NO: 52102 - DNA, 50 bp, synthetic construct
  source 1..50: mol_type = other DNA
acctcgctaaaaaaacgcgaacgaccattaataaaaaatcacacgactcg

SEQ ID NO: 52103 - DNA, 50 bp, synthetic construct
  source 1..50: mol_type = other DNA
cttaaacctcactaaaaaaacacaaacaaccattaataaaaaatcacaca

SEQ ID NO: 52104 - DNA, 50 bp, synthetic construct
  source 1..50: mol_type = other DNA
cttaaacctcgctaaaaaaacgcgaacgaccattaataaaaaatcacacg

SEQ ID NO: 52105 - DNA, 50 bp, synthetic construct
  source 1..50: mol_type = other DNA
caattaaccatccttcctcaacaaatcatataatttttcaccaataacca

SEQ ID NO: 52106 - DNA, 50 bp, synthetic construct
  source 1..50: mol_type = other DNA
cgattaaccgtccttcctcaacgaatcgtataatttttcaccaataaccg

SEQ ID NO: 52107 - DNA, 50 bp, synthetic construct
  source 1..50: mol_type = other DNA
tataatttttcaccaataaccactcacatttctttaacaaaatctaaaca

SEQ ID NO: 52108 - DNA, 50 bp, synthetic construct
  source 1..50: mol_type = other DNA
tataatttttcaccaataaccgctcgcgtttctttaacgaaatctaaacg

SEQ ID NO: 52109 - DNA, 50 bp, synthetic construct
  source 1..50: mol_type = other DNA
acatttctttaacaaaatctaaacaataaaaaataacaaccaaaaaaaca

SEQ ID NO: 52110 - DNA, 50 bp, synthetic construct
  source 1..50: mol_type = other DNA
gcgtttctttaacgaaatctaaacgataaaaaataacgaccaaaaaaacg

SEQ ID NO: 52111 - DNA, 50 bp, synthetic construct
  source 1..50: mol_type = other DNA
taacaaaatctaaacaataaaaaataacaaccaaaaaaacaccccctaca

SEQ ID NO: 52112 - DNA, 50 bp, synthetic construct
  source 1..50: mol_type = other DNA
taacgaaatctaaacgataaaaaataacgaccaaaaaaacgccccctacg

SEQ ID NO: 52113 - DNA, 50 bp, synthetic construct
  source 1..50: mol_type = other DNA
aaaaataacaaccaaaaaaacaccccctacacatcctaaaattaactaca

SEQ ID NO: 52114 - DNA, 50 bp, synthetic construct
  source 1..50: mol_type = other DNA
aaaaataacgaccaaaaaaacgccccctacgcgtcctaaaattaactacg

SEQ ID NO: 52115 - DNA, 50 bp, synthetic construct
  source 1..50: mol_type = other DNA
aattccctttacaaaacaccaaaaatcataattcttatctttcaaaccca

SEQ ID NO: 52116 - DNA, 50 bp, synthetic construct
  source 1..50: mol_type = other DNA
aattccctttacgaaacgccgaaaatcgtaattcttatctttcgaacccg

SEQ ID NO: 52117 - DNA, 50 bp, synthetic construct
  source 1..50: mol_type = other DNA
taacaaaattccctttacaaaacaccaaaaatcataattcttatctttca

SEQ ID NO: 52118 - DNA, 50 bp, synthetic construct
  source 1..50: mol_type = other DNA
taacgaaattccctttacgaaacgccgaaaatcgtaattcttatctttcg

SEQ ID NO: 52119 - DNA, 50 bp, synthetic construct
  source 1..50: mol_type = other DNA
ctactaaaactacaaccaaacctaaaaaactaaaaacttaaataaaaaca

SEQ ID NO: 52120 - DNA, 50 bp, synthetic construct
  source 1..50: mol_type = other DNA
ctactaaaactacgaccgaacctaaaaaactaaaaacttaaataaaaacg

SEQ ID NO: 52121 - DNA, 50 bp, synthetic construct
  source 1..50: mol_type = other DNA
aactacaaccaaacctaaaaaactaaaaacttaaataaaaacaacaccca

SEQ ID NO: 52122 - DNA, 50 bp, synthetic construct
  source 1..50: mol_type = other DNA
aactacgaccgaacctaaaaaactaaaaacttaaataaaaacgacacccg

SEQ ID NO: 52123 - DNA, 50 bp, synthetic construct
  source 1..50: mol_type = other DNA
taacactacctccaaaaaaccaaatccacaaaaaattaaatcccctacca

SEQ ID NO: 52124 - DNA, 50 bp, synthetic construct
  source 1..50: mol_type = other DNA
taacgctacctccgaaaaaccaaatccacaaaaaattaaatcccctaccg

SEQ ID NO: 52125 - DNA, 50 bp, synthetic construct
  source 1..50: mol_type = other DNA
ttaataaacaaaataataaaaataaatccaatacataaaacccaacccca

SEQ ID NO: 52126 - DNA, 50 bp, synthetic construct
  source 1..50: mol_type = other DNA
ttaataaacaaaataataaaaataaatccaatacgtaaaacccaaccccg

SEQ ID NO: 52127 - DNA, 50 bp, synthetic construct
  source 1..50: mol_type = other DNA
caaaaacaacatcatcaataattttaaccccttcaaaactaaatttcaca

SEQ ID NO: 52128 - DNA, 50 bp, synthetic construct
  source 1..50: mol_type = other DNA
cgaaaacaacgtcatcgataattttaaccccttcgaaactaaatttcacg

SEQ ID NO: 52129 - DNA, 50 bp, synthetic construct
  source 1..50: mol_type = other DNA
aattaaacacccacaatacaaccaactaacaaatccaaaaaaatacaaca

SEQ ID NO: 52130 - DNA, 50 bp, synthetic construct
  source 1..50: mol_type = other DNA
aattaaacgcccacaatacgaccaactaacgaatccaaaaaaatacaacg

SEQ ID NO: 52131 - DNA, 50 bp, synthetic construct
  source 1..50: mol_type = other DNA
ccccaaacacaaaaaaacaaatacccaaaaaaaacaataaataacaatca

SEQ ID NO: 52132 - DNA, 50 bp, synthetic construct
  source 1..50: mol_type = other DNA
ccccaaacgcgaaaaaacgaatacccgaaaaaaacaataaataacaatcg

SEQ ID NO: 52133 - DNA, 50 bp, synthetic construct
  source 1..50: mol_type = other DNA
acacaaaaaaacaaatacccaaaaaaaacaataaataacaatcaaaaaca

SEQ ID NO: 52134 - DNA, 50 bp, synthetic construct
  source 1..50: mol_type = other DNA
acgcgaaaaaacgaatacccgaaaaaaacaataaataacaatcgaaaacg

SEQ ID NO: 52135 - DNA, 50 bp, synthetic construct
  source 1..50: mol_type = other DNA
ataaataacaatcaaaaacattcccccaattaaataaccatccaaaacca

SEQ ID NO: 52136 - DNA, 50 bp, synthetic construct
  source 1..50: mol_type = other DNA
ataaataacaatcgaaaacgttcccccaattaaataaccgtccgaaaccg

SEQ ID NO: 52137 - DNA, 50 bp, synthetic construct
  source 1..50: mol_type = other DNA
actaacctcaaaatcataacaaaactaaacaaacaactcaacctcaaaca

SEQ ID NO: 52138 - DNA, 50 bp, synthetic construct
  source 1..50: mol_type = other DNA
actaacctcgaaatcataacaaaactaaacgaacaactcgacctcgaacg

SEQ ID NO: 52139 - DNA, 50 bp, synthetic construct
  source 1..50: mol_type = other DNA
acttactaacctcaaaatcataacaaaactaaacaaacaactcaacctca

SEQ ID NO: 52140 - DNA, 50 bp, synthetic construct
  source 1..50: mol_type = other DNA
acttactaacctcgaaatcataacaaaactaaacgaacaactcgacctcg

SEQ ID NO: 52141 - DNA, 50 bp, synthetic construct
  source 1..50: mol_type = other DNA
caacaaaaacccccaacttactaacctcaaaatcataacaaaactaaaca

SEQ ID NO: 52142 - DNA, 50 bp, synthetic construct
  source 1..50: mol_type = other DNA
cgacaaaaacccccaacttactaacctcgaaatcataacaaaactaaacg

SEQ ID NO: 52143 - DNA, 50 bp, synthetic construct
  source 1..50: mol_type = other DNA
taacaaacatctcaactcaaatccttaaaactcaaaaactctatttctca

SEQ ID NO: 52144 - DNA, 50 bp, synthetic construct
  source 1..50: mol_type = other DNA
taacgaacatctcgactcgaatccttaaaactcgaaaactctatttctcg

SEQ ID NO: 52145 - DNA, 50 bp, synthetic construct
  source 1..50: mol_type = other DNA
acaattcctcataaataatcacaaccaaaaaaaaccaaatctcaaaacca

SEQ ID NO: 52146 - DNA, 50 bp, synthetic construct
  source 1..50: mol_type = other DNA
gcaattcctcataaataatcacgaccaaaaaaaaccgaatctcaaaaccg

SEQ ID NO: 52147 - DNA, 50 bp, synthetic construct
  source 1..50: mol_type = other DNA
tcttccataaaatcatcatcactaatatcatcaaatttaacaacaaccca

SEQ ID NO: 52148 - DNA, 50 bp, synthetic construct
  source 1..50: mol_type = other DNA
tcttccataaaatcgtcatcgctaatatcgtcgaatttaacgacgacccg

SEQ ID NO: 52149 - DNA, 50 bp, synthetic construct
  source 1..50: mol_type = other DNA
agaaaagtaattttttagttttatataattaaaagaataggagaaagtat

SEQ ID NO: 52150 - DNA, 50 bp, synthetic construct
  source 1..50: mol_type = other DNA
agaaaagtaattttttagttttatataattaaaagaataggagaaagtac

SEQ ID NO: 52151 - DNA, 50 bp, synthetic construct
  source 1..50: mol_type = other DNA
attactacaataatttaaaaaaatcataatttttcacaacccaaacaaca

SEQ ID NO: 52152 - DNA, 50 bp, synthetic construct
  source 1..50: mol_type = other DNA
attactacaataatttaaaaaaatcgtaatttttcgcaacccgaacgacg

SEQ ID NO: 52153 - DNA, 50 bp, synthetic construct
  source 1..50: mol_type = other DNA
aataatttaaaaaaatcataatttttcacaacccaaacaacaaaataaca

SEQ ID NO: 52154 - DNA, 50 bp, synthetic construct
  source 1..50: mol_type = other DNA
aataatttaaaaaaatcgtaatttttcgcaacccgaacgacgaaataacg

SEQ ID NO: 52155 - DNA, 50 bp, synthetic construct
  source 1..50: mol_type = other DNA
atcataatttttcacaacccaaacaacaaaataacactttaatataaaca

SEQ ID NO: 52156 - DNA, 50 bp, synthetic construct
  source 1..50: mol_type = other DNA
atcgtaatttttcgcaacccgaacgacgaaataacgctttaatataaacg

SEQ ID NO: 52157 - DNA, 50 bp, synthetic construct
  source 1..50: mol_type = other DNA
aaaataaaaacaacaccaaattccaaaaactaacaccacaaaaaaaaaca

SEQ ID NO: 52158 - DNA, 50 bp, synthetic construct
  source 1..50: mol_type = other DNA
aaaataaaaacgacgccaaattccaaaaactaacgccgcgaaaaaaaacg

SEQ ID NO: 52159 - DNA, 50 bp, synthetic construct
  source 1..50: mol_type = other DNA
aaaaaaactaataaaacaacttccctctacaatctttccacaaaaacaca

SEQ ID NO: 52160 - DNA, 50 bp, synthetic construct
  source 1..50: mol_type = other DNA
aaaaaaactaataaaacgacttccctctacgatctttccacaaaaacgcg

SEQ ID NO: 52161 - DNA, 50 bp, synthetic construct
  source 1..50: mol_type = other DNA
aaaaaaaaactaataaaacaacttccctctacaatctttccacaaaaaca

SEQ ID NO: 52162 - DNA, 50 bp, synthetic construct
  source 1..50: mol_type = other DNA
aaaaaaaaactaataaaacgacttccctctacgatctttccacaaaaacg

SEQ ID NO: 52163 - DNA, 50 bp, synthetic construct
  source 1..50: mol_type = other DNA
aaaaactaacaaaactcaacctcaaaatccacacccctataaaaaaacca

SEQ ID NO: 52164 - DNA, 50 bp, synthetic construct
  source 1..50: mol_type = other DNA
aaaaactaacaaaactcgacctcaaaatccgcgcccctataaaaaaaccg

SEQ ID NO: 52165 - DNA, 50 bp, synthetic construct
  source 1..50: mol_type = other DNA
tcaaaaaacacacaataattaccaaaaaaccccacactctataaaaaaca

SEQ ID NO: 52166 - DNA, 50 bp, synthetic construct
  source 1..50: mol_type = other DNA
tcgaaaaacacgcgataattaccgaaaaaccccgcactctataaaaaacg

SEQ ID NO: 52167 - DNA, 50 bp, synthetic construct
  source 1..50: mol_type = other DNA
attaccaaaaaaccccacactctataaaaaacaaaactacaaaactacca

SEQ ID NO: 52168 - DNA, 50 bp, synthetic construct
  source 1..50: mol_type = other DNA
attaccgaaaaaccccgcactctataaaaaacgaaactacgaaactaccg

SEQ ID NO: 52169 - DNA, 50 bp, synthetic construct
  source 1..50: mol_type = other DNA
ataaaaaacaaaactacaaaactaccaaaacaatttaaaaaccaaactca

SEQ ID NO: 52170 - DNA, 50 bp, synthetic construct
  source 1..50: mol_type = other DNA
ataaaaaacgaaactacgaaactaccgaaacgatttaaaaaccgaactcg

SEQ ID NO: 52171 - DNA, 50 bp, synthetic construct
  source 1..50: mol_type = other DNA
aataaactacctaaaataacaacaccaaaaaacaacaaaaaataaaacca

SEQ ID NO: 52172 - DNA, 50 bp, synthetic construct
  source 1..50: mol_type = other DNA
aataaactacctaaaataacgacgccgaaaaacgacgaaaaataaaaccg

SEQ ID NO: 52173 - DNA, 50 bp, synthetic construct
  source 1..50: mol_type = other DNA
aaaaaccaaaccaaataaactacctaaaataacaacaccaaaaaacaaca

SEQ ID NO: 52174 - DNA, 50 bp, synthetic construct
  source 1..50: mol_type = other DNA
aaaaaccgaaccgaataaactacctaaaataacgacgccgaaaaacgacg

SEQ ID NO: 52175 - DNA, 50 bp, synthetic construct
  source 1..50: mol_type = other DNA
aaaaaaaaccaaaccaaataaactacctaaaataacaacaccaaaaaaca

SEQ ID NO: 52176 - DNA, 50 bp, synthetic construct
  source 1..50: mol_type = other DNA
aaaaaaaaccgaaccgaataaactacctaaaataacgacgccgaaaaacg

SEQ ID NO: 52177 - DNA, 50 bp, synthetic construct
  source 1..50: mol_type = other DNA
tccaaacacaaaaaaaaaccaaaccaaataaactacctaaaataacaaca

SEQ ID NO: 52178 - DNA, 50 bp, synthetic construct
  source 1..50: mol_type = other DNA
tccgaacgcgaaaaaaaaccgaaccgaataaactacctaaaataacgacg

SEQ ID NO: 52179 - DNA, 50 bp, synthetic construct
  source 1..50: mol_type = other DNA
ataaaaacaccccataaaaaataatccaaacacaaaaaaaaaccaaacca

SEQ ID NO: 52180 - DNA, 50 bp, synthetic construct
  source 1..50: mol_type = other DNA
ataaaaacaccccgtaaaaaataatccgaacgcgaaaaaaaaccgaaccg

SEQ ID NO: 52181 - DNA, 50 bp, synthetic construct
  source 1..50: mol_type = other DNA
acacaataaaaacaccccataaaaaataatccaaacacaaaaaaaaacca

SEQ ID NO: 52182 - DNA, 50 bp, synthetic construct
  source 1..50: mol_type = other DNA
acgcaataaaaacaccccgtaaaaaataatccgaacgcgaaaaaaaaccg

SEQ ID NO: 52183 - DNA, 50 bp, synthetic construct
  source 1..50: mol_type = other DNA
aaatccttaacctttaaaaaaaacaacaaaaaactcaacaaccatcacca

SEQ ID NO: 52184 - DNA, 50 bp, synthetic construct
  source 1..50: mol_type = other DNA
aaatccttaacctttaaaaaaaacgacgaaaaactcgacgaccatcgccg

SEQ ID NO: 52185 - DNA, 50 bp, synthetic construct
  source 1..50: mol_type = other DNA
aaaaaatccttaacctttaaaaaaaacaacaaaaaactcaacaaccatca

SEQ ID NO: 52186 - DNA, 50 bp, synthetic construct
  source 1..50: mol_type = other DNA
aaaaaatccttaacctttaaaaaaaacgacgaaaaactcgacgaccatcg

SEQ ID NO: 52187 - DNA, 50 bp, synthetic construct
  source 1..50: mol_type = other DNA
aaacaaaacaacaaacacaaaaaaatccttaacctttaaaaaaaacaaca

SEQ ID NO: 52188 - DNA, 50 bp, synthetic construct
  source 1..50: mol_type = other DNA
aaacgaaacaacaaacgcgaaaaaatccttaacctttaaaaaaaacgacg

SEQ ID NO: 52189 - DNA, 50 bp, synthetic construct
  source 1..50: mol_type = other DNA
aataaacaaaacaacaaacacaaaaaaatccttaacctttaaaaaaaaca

SEQ ID NO: 52190 - DNA, 50 bp, synthetic construct
  source 1..50: mol_type = other DNA
aataaacgaaacaacaaacgcgaaaaaatccttaacctttaaaaaaaacg

SEQ ID NO: 52191 - DNA, 50 bp, synthetic construct
  source 1..50: mol_type = other DNA
aagtgagaatattggtagaaggtttgattaattaaagaaggtagtgatgt

SEQ ID NO: 52192 - DNA, 50 bp, synthetic construct
  source 1..50: mol_type = other DNA
aagcgagaatattggtagaaggtttgattaattaaagaaggtagtgatgc

SEQ ID NO: 52193 - DNA, 50 bp, synthetic construct
  source 1..50: mol_type = other DNA
aaaatattaacaaaaaacttaaccaatcaaaaaaaacaataatacacaca

SEQ ID NO: 52194 - DNA, 50 bp, synthetic construct
  source 1..50: mol_type = other DNA
aaaatattaacaaaaaacttaaccaatcaaaaaaaacaataatacgcgcg

SEQ ID NO: 52195 - DNA, 50 bp, synthetic construct
  source 1..50: mol_type = other DNA
aaaacttaaccaatcaaaaaaaacaataatacacacacaatctaccccca

SEQ ID NO: 52196 - DNA, 50 bp, synthetic construct
  source 1..50: mol_type = other DNA
aaaacttaaccaatcaaaaaaaacaataatacgcgcgcgatctacccccg

SEQ ID NO: 52197 - DNA, 50 bp, synthetic construct
  source 1..50: mol_type = other DNA
tattggtatgttgttgaataatatgtaatgtagtttagagatatgtgagt

SEQ ID NO: 52198 - DNA, 50 bp, synthetic construct
  source 1..50: mol_type = other DNA
tattggtatgttgttgaataatatgtaacgtagtttagagatatgtgagc

SEQ ID NO: 52199 - DNA, 50 bp, synthetic construct
  source 1..50: mol_type = other DNA
ataaaataaaaatacaaaaattaacccaccaaaatactaccctatttaca

SEQ ID NO: 52200 - DNA, 50 bp, synthetic construct
  source 1..50: mol_type = other DNA
ataaaataaaaatacgaaaattaacccaccgaaatactaccctatttacg

SEQ ID NO: 52201 - DNA, 50 bp, synthetic construct
  source 1..50: mol_type = other DNA
atcccccttacacataaaaaactaaaaaacacaaataaaacaacacctca

SEQ ID NO: 52202 - DNA, 50 bp, synthetic construct
  source 1..50: mol_type = other DNA
atcccccttacacgtaaaaaactaaaaaacgcaaataaaacaacacctcg

SEQ ID NO: 52203 - DNA, 50 bp, synthetic construct
  source 1..50: mol_type = other DNA
aaacaaaaattataataaactaaaatcacaccaacctaaacaacaaaaca

SEQ ID NO: 52204 - DNA, 50 bp, synthetic construct
  source 1..50: mol_type = other DNA
aaacgaaaattataataaactaaaatcacgccaacctaaacgacaaaacg

SEQ ID NO: 52205 - DNA, 50 bp, synthetic construct
  source 1..50: mol_type = other DNA
aacccaaaaaacaaaaattataataaactaaaatcacaccaacctaaaca

SEQ ID NO: 52206 - DNA, 50 bp, synthetic construct
  source 1..50: mol_type = other DNA
aacccgaaaaacgaaaattataataaactaaaatcacgccaacctaaacg

SEQ ID NO: 52207 - DNA, 50 bp, synthetic construct
  source 1..50: mol_type = other DNA
accccatctctacaaaaaatttaaaaattaactaaacataataactcaca

SEQ ID NO: 52208 - DNA, 50 bp, synthetic construct
  source 1..50: mol_type = other DNA
accccatctctacaaaaaatttaaaaattaactaaacgtaataactcacg

SEQ ID NO: 52209 - DNA, 50 bp, synthetic construct
  source 1..50: mol_type = other DNA
acattcactaattccttcaacaacccttcactaaacacccactatataca

SEQ ID NO: 52210 - DNA, 50 bp, synthetic construct
  source 1..50: mol_type = other DNA
acgttcactaattccttcaacaacccttcactaaacacccgctatatacg

SEQ ID NO: 52211 - DNA, 50 bp, synthetic construct
  source 1..50: mol_type = other DNA
taaacctcaaccaaattctaccaaaactaactcaacaacaacacctacca

SEQ ID NO: 52212 - DNA, 50 bp, synthetic construct
  source 1..50: mol_type = other DNA
taaacctcaaccaaattctaccaaaactaactcaacaacgacacctaccg

SEQ ID NO: 52213 - DNA, 50 bp, synthetic construct
  source 1..50: mol_type = other DNA
ccccctactaaccataaacaatataacaaccaaaataaaacaaaacttca

SEQ ID NO: 52214 - DNA, 50 bp, synthetic construct
  source 1..50: mol_type = other DNA
ccccctactaaccgtaaacgatataacaaccaaaataaaacaaaacttcg

SEQ ID NO: 52215 - DNA, 50 bp, synthetic construct
  source 1..50: mol_type = other DNA
actacattcataactccccacctaacttaaatttccaactacaaaacaca

SEQ ID NO: 52216 - DNA, 50 bp, synthetic construct
  source 1..50: mol_type = other DNA
actacattcgtaactccccgcctaacttaaatttccaactacaaaacacg

SEQ ID NO: 52217 - DNA, 50 bp, synthetic construct
  source 1..50: mol_type = other DNA
aaaactaaaaacacctaaccaactaaataaaaaccaccataaacaacaca

SEQ ID NO: 52218 - DNA, 50 bp, synthetic construct
  source 1..50: mol_type = other DNA
gaaactaaaaacgcctaaccgactaaataaaaaccaccataaacaacgcg

SEQ ID NO: 52219 - DNA, 50 bp, synthetic construct
  source 1..50: mol_type = other DNA
cataaaactaaacaaccatcactcctctactattactaaaacaacaacca

SEQ ID NO: 52220 - DNA, 50 bp, synthetic construct
  source 1..50: mol_type = other DNA
cgtaaaactaaacaaccatcgctcctctactattactaaaacaacaaccg

SEQ ID NO: 52221 - DNA, 50 bp, synthetic construct
  source 1..50: mol_type = other DNA
aactacccaaccccacaaacctactataataataaaaacaccaaccaaca

SEQ ID NO: 52222 - DNA, 50 bp, synthetic construct
  source 1..50: mol_type = other DNA
aactacccaaccccacgaacctactataataataaaaacaccaaccaacg

SEQ ID NO: 52223 - DNA, 50 bp, synthetic construct
  source 1..50: mol_type = other DNA
aaacaacctccccaccattatacaaatcaccaacaataaaacccaaacca

SEQ ID NO: 52224 - DNA, 50 bp, synthetic construct
  source 1..50: mol_type = other DNA
aaacaacctccccaccgttatacaaatcaccaacaataaaacccaaaccg

SEQ ID NO: 52225 - DNA, 50 bp, synthetic construct
  source 1..50: mol_type = other DNA
acaccaaacactaattaacaactactcctcaactataactatacccacca

SEQ ID NO: 52226 - DNA, 50 bp, synthetic construct
  source 1..50: mol_type = other DNA
acgccgaacactaattaacaactactcctcaactataactatacccaccg

SEQ ID NO: 52227 - DNA, 50 bp, synthetic construct
  source 1..50: mol_type = other DNA
attaacaataccaataacaacaataaaaataaaaaacaatcatcaacaca

SEQ ID NO: 52228 - DNA, 50 bp, synthetic construct
  source 1..50: mol_type = other DNA
attaacgataccaataacgacaataaaaataaaaaacaatcgtcgacgcg

SEQ ID NO: 52229 - DNA, 50 bp, synthetic construct
  source 1..50: mol_type = other DNA
caaaaccaacaataccaaaaaaactaaaaccataaccaacacaaaaaaca

SEQ ID NO: 52230 - DNA, 50 bp, synthetic construct
  source 1..50: mol_type = other DNA
caaaaccaacaataccaaaaaaactaaaaccgtaaccgacacaaaaaacg

SEQ ID NO: 52231 - DNA, 50 bp, synthetic construct
  source 1..50: mol_type = other DNA
ataatacaaacataaacatcatccttctaactaacaatacaaaaattcca

SEQ ID NO: 52232 - DNA, 50 bp, synthetic construct
  source 1..50: mol_type = other DNA
ataatacaaacgtaaacgtcgtccttctaactaacgatacgaaaattccg

SEQ ID NO: 52233 - DNA, 50 bp, synthetic construct
  source 1..50: mol_type = other DNA
cataaacacataatacaaacataaacatcatccttctaactaacaataca

SEQ ID NO: 52234 - DNA, 50 bp, synthetic construct
  source 1..50: mol_type = other DNA
cgtaaacacataatacaaacgtaaacgtcgtccttctaactaacgatacg

SEQ ID NO: 52235 - DNA, 50 bp, synthetic construct
  source 1..50: mol_type = other DNA
taacacataaacacataatacaaacataaacatcatccttctaactaaca

SEQ ID NO: 52236 - DNA, 50 bp, synthetic construct
  source 1..50: mol_type = other DNA
taacgcgtaaacacataatacaaacgtaaacgtcgtccttctaactaacg

SEQ ID NO: 52237 - DNA, 50 bp, synthetic construct
  source 1..50: mol_type = other DNA
cctaataattcataataacacataaacacataatacaaacataaacatca

SEQ ID NO: 52238 - DNA, 50 bp, synthetic construct
  source 1..50: mol_type = other DNA
cctaataattcataataacgcgtaaacacataatacaaacgtaaacgtcg

SEQ ID NO: 52239 - DNA, 50 bp, synthetic construct
  source 1..50: mol_type = other DNA
aatcaccaatcccatacccctcaactaacctaataattcataataacaca

SEQ ID NO: 52240 - DNA, 50 bp, synthetic construct
  source 1..50: mol_type = other DNA
aatcgccaatcccatacccctcgactaacctaataattcataataacgcg

SEQ ID NO: 52241 - DNA, 50 bp, synthetic construct
  source 1..50: mol_type = other DNA
ctaatcaccaatcccatacccctcaactaacctaataattcataataaca

SEQ ID NO: 52242 - DNA, 50 bp, synthetic construct
  source 1..50: mol_type = other DNA
ctaatcgccaatcccatacccctcgactaacctaataattcataataacg

SEQ ID NO: 52243 - DNA, 50 bp, synthetic construct
  source 1..50: mol_type = other DNA
cacatctatattatatacctacacaccatcataaactaccaaatcaacca

SEQ ID NO: 52244 - DNA, 50 bp, synthetic construct
  source 1..50: mol_type = other DNA
cacgtctatattatatacctacgcgccatcataaactaccaaatcaaccg

SEQ ID NO: 52245 - DNA, 50 bp, synthetic construct
  source 1..50: mol_type = other DNA
ctacaaatacaaaatctaaaccaacaaaaacacaacataaaaaaaacaca

SEQ ID NO: 52246 - DNA, 50 bp, synthetic construct
  source 1..50: mol_type = other DNA
ctacaaatacgaaatctaaaccaacgaaaacgcgacgtaaaaaaaacgcg

SEQ ID NO: 52247 - DNA, 50 bp, synthetic construct
  source 1..50: mol_type = other DNA
tactacaaatacaaaatctaaaccaacaaaaacacaacataaaaaaaaca

SEQ ID NO: 52248 - DNA, 50 bp, synthetic construct
  source 1..50: mol_type = other DNA
tactacaaatacgaaatctaaaccaacgaaaacgcgacgtaaaaaaaacg

SEQ ID NO: 52249 - DNA, 50 bp, synthetic construct
  source 1..50: mol_type = other DNA
aaaaccaactctactacaaatacaaaatctaaaccaacaaaaacacaaca

SEQ ID NO: 52250 - DNA, 50 bp, synthetic construct
  source 1..50: mol_type = other DNA
aaaaccgactctactacaaatacgaaatctaaaccaacgaaaacgcgacg

SEQ ID NO: 52251 - DNA, 50 bp, synthetic construct
  source 1..50: mol_type = other DNA
ctccaaaaaccaactctactacaaatacaaaatctaaaccaacaaaaaca

SEQ ID NO: 52252 - DNA, 50 bp, synthetic construct
  source 1..50: mol_type = other DNA
ctccgaaaaccgactctactacaaatacgaaatctaaaccaacgaaaacg

SEQ ID NO: 52253 - DNA, 50 bp, synthetic construct
  source 1..50: mol_type = other DNA
tcaaaaataacctacaataaaaaacccaaaaaacaccaacaaacactaca

SEQ ID NO: 52254 - DNA, 50 bp, synthetic construct
  source 1..50: mol_type = other DNA
tcgaaaataacctacaataaaaaacccgaaaaacgccgacgaacactacg

SEQ ID NO: 52255 - DNA, 50 bp, synthetic construct
  source 1..50: mol_type = other DNA
aacaaaaaatcaaaaataacctacaataaaaaacccaaaaaacaccaaca

SEQ ID NO: 52256 - DNA, 50 bp, synthetic construct
  source 1..50: mol_type = other DNA
aacgaaaaatcgaaaataacctacaataaaaaacccgaaaaacgccgacg

SEQ ID NO: 52257 - DNA, 50 bp, synthetic construct
  source 1..50: mol_type = other DNA
tacaacaaaaaatcaaaaataacctacaataaaaaacccaaaaaacacca

SEQ ID NO: 52258 - DNA, 50 bp, synthetic construct
  source 1..50: mol_type = other DNA
tacaacgaaaaatcgaaaataacctacaataaaaaacccgaaaaacgccg

SEQ ID NO: 52259 - DNA, 50 bp, synthetic construct
  source 1..50: mol_type = other DNA
aactacaacaaaaaatcaaaaataacctacaataaaaaacccaaaaaaca

SEQ ID NO: 52260 - DNA, 50 bp, synthetic construct
  source 1..50: mol_type = other DNA
gactacaacgaaaaatcgaaaataacctacaataaaaaacccgaaaaacg

SEQ ID NO: 52261 - DNA, 50 bp, synthetic construct
  source 1..50: mol_type = other DNA
aaataacaactacaacaaaaaatcaaaaataacctacaataaaaaaccca

SEQ ID NO: 52262 - DNA, 50 bp, synthetic construct
  source 1..50: mol_type = other DNA
aaataacgactacaacgaaaaatcgaaaataacctacaataaaaaacccg

SEQ ID NO: 52263 - DNA, 50 bp, synthetic construct
  source 1..50: mol_type = other DNA
ccataaacaaactaaaactcaaaaaaaataatcctcaactcaactaacca

SEQ ID NO: 52264 - DNA, 50 bp, synthetic construct
  source 1..50: mol_type = other DNA
ccgtaaacaaactaaaactcaaaaaaaataatcctcaactcgactaaccg

SEQ ID NO: 52265 - DNA, 50 bp, synthetic construct
  source 1..50: mol_type = other DNA
caaacaaactaatacatcctcctcttaaccacaaaaaacaacatcaccca

SEQ ID NO: 52266 - DNA, 50 bp, synthetic construct
  source 1..50: mol_type = other DNA
caaacgaactaatacatcctcctcttaaccacaaaaaacaacatcgcccg

SEQ ID NO: 52267 - DNA, 50 bp, synthetic construct
  source 1..50: mol_type = other DNA
ctaaacaaaaacaaactacaaataactacaacaaacataaaaccaacaca

SEQ ID NO: 52268 - DNA, 50 bp, synthetic construct
  source 1..50: mol_type = other DNA
ctaaacgaaaacaaactacgaataactacgacaaacataaaaccgacgcg

SEQ ID NO: 52269 - DNA, 50 bp, synthetic construct
  source 1..50: mol_type = other DNA
tactaaacaaaaacaaactacaaataactacaacaaacataaaaccaaca

SEQ ID NO: 52270 - DNA, 50 bp, synthetic construct
  source 1..50: mol_type = other DNA
tactaaacgaaaacaaactacgaataactacgacaaacataaaaccgacg

SEQ ID NO: 52271 - DNA, 50 bp, synthetic construct
  source 1..50: mol_type = other DNA
atttactaaacaaaaacaaactacaaataactacaacaaacataaaacca

SEQ ID NO: 52272 - DNA, 50 bp, synthetic construct
  source 1..50: mol_type = other DNA
gtttactaaacgaaaacaaactacgaataactacgacaaacataaaaccg

SEQ ID NO: 52273 - DNA, 50 bp, synthetic construct
  source 1..50: mol_type = other DNA
tataaaaaacttatacaaataaaacatttactaaacaaaaacaaactaca

SEQ ID NO: 52274 - DNA, 50 bp, synthetic construct
  source 1..50: mol_type = other DNA
tataaaaaacttatacaaataaaacgtttactaaacgaaaacaaactacg

SEQ ID NO: 52275 - DNA, 50 bp, synthetic construct
  source 1..50: mol_type = other DNA
ttacttacacaaactcttcataacaaacctctacaaaccaacaaacacca

SEQ ID NO: 52276 - DNA, 50 bp, synthetic construct
  source 1..50: mol_type = other DNA
ttacttacacaaactcttcataacaaacctctacaaaccaacgaacgccg

SEQ ID NO: 52277 - DNA, 50 bp, synthetic construct
  source 1..50: mol_type = other DNA
aaaaaaaaactacttcttcactaaaattaacaacaaaaaaacccacttca

SEQ ID NO: 52278 - DNA, 50 bp, synthetic construct
  source 1..50: mol_type = other DNA
aaaaaaaaactacttcttcactaaaattaacgacgaaaaaacccgcttcg

SEQ ID NO: 52279 - DNA, 50 bp, synthetic construct
  source 1..50: mol_type = other DNA
actacttcttcactaaaattaacaacaaaaaaacccacttcaaaaaaaca

SEQ ID NO: 52280 - DNA, 50 bp, synthetic construct
  source 1..50: mol_type = other DNA
actacttcttcactaaaattaacgacgaaaaaacccgcttcgaaaaaacg

SEQ ID NO: 52281 - DNA, 50 bp, synthetic construct
  source 1..50: mol_type = other DNA
cactaaaattaacaacaaaaaaacccacttcaaaaaaacaaaaactttca

SEQ ID NO: 52282 - DNA, 50 bp, synthetic construct
  source 1..50: mol_type = other DNA
cactaaaattaacgacgaaaaaacccgcttcgaaaaaacgaaaactttcg

SEQ ID NO: 52283 - DNA, 50 bp, synthetic construct
  source 1..50: mol_type = other DNA
actttcataactaacccaatatccctacaaaaaaccaaaaaaaacaaaca

SEQ ID NO: 52284 - DNA, 50 bp, synthetic construct
  source 1..50: mol_type = other DNA
actttcgtaactaacccaatatccctacgaaaaaccgaaaaaaacgaacg

SEQ ID NO: 52285 - DNA, 50 bp, synthetic construct
  source 1..50: mol_type = other DNA
atccctacaaaaaaccaaaaaaaacaaacaaacaactaaaattaaacaca

SEQ ID NO: 52286 - DNA, 50 bp, synthetic construct
  source 1..50: mol_type = other DNA
atccctacgaaaaaccgaaaaaaacgaacgaacaactaaaattaaacacg

SEQ ID NO: 52287 - DNA, 50 bp, synthetic construct
  source 1..50: mol_type = other DNA
aaaaaaaaccaaatacccaaataaaaaacaaaactaacacaaataaaaca

SEQ ID NO: 52288 - DNA, 50 bp, synthetic construct
  source 1..50: mol_type = other DNA
aaaaaaaaccaaatacccgaataaaaaacaaaactaacgcaaataaaacg

SEQ ID NO: 52289 - DNA, 50 bp, synthetic construct
  source 1..50: mol_type = other DNA
aataacaaaaacaacacacacaaaaatataaaacaaaatcacttataaca

SEQ ID NO: 52290 - DNA, 50 bp, synthetic construct
  source 1..50: mol_type = other DNA
gataacgaaaacgacacgcgcgaaaatataaaacgaaatcacttataacg

SEQ ID NO: 52291 - DNA, 50 bp, synthetic construct
  source 1..50: mol_type = other DNA
ccttttcctttcaccctacccaatacttaataacaccataaataacctca

SEQ ID NO: 52292 - DNA, 50 bp, synthetic construct
  source 1..50: mol_type = other DNA
ccttttcctttcgccctacccaatacttaataacgccataaataacctcg

SEQ ID NO: 52293 - DNA, 50 bp, synthetic construct
  source 1..50: mol_type = other DNA
aaactaaacaaaatcttaaaacaaccaaactaataaaactaaatcaaaca

SEQ ID NO: 52294 - DNA, 50 bp, synthetic construct
  source 1..50: mol_type = other DNA
gaactaaacgaaatcttaaaacgaccgaactaataaaactaaatcaaacg

SEQ ID NO: 52295 - DNA, 50 bp, synthetic construct
  source 1..50: mol_type = other DNA
aactaaatcaaacaaaaaccaaaacccaaaactaaacttcatatcctaca

SEQ ID NO: 52296 - DNA, 50 bp, synthetic construct
  source 1..50: mol_type = other DNA
aactaaatcaaacgaaaaccgaaacccgaaactaaacttcgtatcctacg

SEQ ID NO: 52297 - DNA, 50 bp, synthetic construct
  source 1..50: mol_type = other DNA
caaatacacacaacccatactctcaaattcctaacctaaaaaaattaaca

SEQ ID NO: 52298 - DNA, 50 bp, synthetic construct
  source 1..50: mol_type = other DNA
caaatacgcgcaacccgtactctcaaattcctaacctaaaaaaattaacg

SEQ ID NO: 52299 - DNA, 50 bp, synthetic construct
  source 1..50: mol_type = other DNA
cctacattccaaaaacaccaacccctccaaattaaaaatctaaaaataca

SEQ ID NO: 52300 - DNA, 50 bp, synthetic construct
  source 1..50: mol_type = other DNA
cctacgttccgaaaacgccaacccctccaaattaaaaatctaaaaatacg

SEQ ID NO: 52301 - DNA, 50 bp, synthetic construct
  source 1..50: mol_type = other DNA
tccaaaaacaccaacccctccaaattaaaaatctaaaaatacaaactaca

SEQ ID NO: 52302 - DNA, 50 bp, synthetic construct
  source 1..50: mol_type = other DNA
tccgaaaacgccaacccctccaaattaaaaatctaaaaatacgaactacg

SEQ ID NO: 52303 - DNA, 50 bp, synthetic construct
  source 1..50: mol_type = other DNA
caaaaacaccaacccctccaaattaaaaatctaaaaatacaaactacaca

SEQ ID NO: 52304 - DNA, 50 bp, synthetic construct
  source 1..50: mol_type = other DNA
cgaaaacgccaacccctccaaattaaaaatctaaaaatacgaactacgcg

SEQ ID NO: 52305 - DNA, 50 bp, synthetic construct
  source 1..50: mol_type = other DNA
aatcaaaaacaaaaacaaaaattataaataaccaaaaaaaatccctccca

SEQ ID NO: 52306 - DNA, 50 bp, synthetic construct
  source 1..50: mol_type = other DNA
aatcgaaaacgaaaacgaaaattataaataaccgaaaaaaatccctcccg

SEQ ID NO: 52307 - DNA, 50 bp, synthetic construct
  source 1..50: mol_type = other DNA
aatttatacaacaaacacaccaactcctaattaaaaaaatcactaataca

SEQ ID NO: 52308 - DNA, 50 bp, synthetic construct
  source 1..50: mol_type = other DNA
aatttatacaacgaacgcgccaactcctaattaaaaaaatcgctaatacg

SEQ ID NO: 52309 - DNA, 50 bp, synthetic construct
  source 1..50: mol_type = other DNA
tttatacaacaaacacaccaactcctaattaaaaaaatcactaatacaca

SEQ ID NO: 52310 - DNA, 50 bp, synthetic construct
  source 1..50: mol_type = other DNA
tttatacaacgaacgcgccaactcctaattaaaaaaatcgctaatacgcg

SEQ ID NO: 52311 - DNA, 50 bp, synthetic construct
  source 1..50: mol_type = other DNA
ccaactcctaattaaaaaaatcactaatacacaccacataacaaaaaaca

SEQ ID NO: 52312 - DNA, 50 bp, synthetic construct
  source 1..50: mol_type = other DNA
ccaactcctaattaaaaaaatcgctaatacgcgccgcgtaacaaaaaacg

SEQ ID NO: 52313 - DNA, 50 bp, synthetic construct
  source 1..50: mol_type = other DNA
ctaattaaaaaaatcactaatacacaccacataacaaaaaacaaacccca

SEQ ID NO: 52314 - DNA, 50 bp, synthetic construct
  source 1..50: mol_type = other DNA
ctaattaaaaaaatcgctaatacgcgccgcgtaacaaaaaacgaaccccg

SEQ ID NO: 52315 - DNA, 50 bp, synthetic construct
  source 1..50: mol_type = other DNA
accacatttaaatttcaaacaaacaaacaaaaaacaacccaaataaaaca

SEQ ID NO: 52316 - DNA, 50 bp, synthetic construct
  source 1..50: mol_type = other DNA
accgcatttaaatttcgaacgaacgaacgaaaaacgacccgaataaaacg

SEQ ID NO: 52317 - DNA, 50 bp, synthetic construct
  source 1..50: mol_type = other DNA
catacaaaacaaatacaaatcctatccaacacaaccaaacttacctacca

SEQ ID NO: 52318 - DNA, 50 bp, synthetic construct
  source 1..50: mol_type = other DNA
cgtacaaaacgaatacaaatcctatccaacacaaccaaacttacctaccg

SEQ ID NO: 52319 - DNA, 50 bp, synthetic construct
  source 1..50: mol_type = other DNA
taaaaaaaccctaaaaccacaaaaaaaacaacaaccctaaaccactaaca

SEQ ID NO: 52320 - DNA, 50 bp, synthetic construct
  source 1..50: mol_type = other DNA
taaaaaaaccctaaaaccacgaaaaaaacgacaaccctaaaccgctaacg

SEQ ID NO: 52321 - DNA, 50 bp, synthetic construct
  source 1..50: mol_type = other DNA
aaattaatttaaccaattcttaaaaaaaccctaaaaccacaaaaaaaaca

SEQ ID NO: 52322 - DNA, 50 bp, synthetic construct
  source 1..50: mol_type = other DNA
aaattaatttaaccgattcttaaaaaaaccctaaaaccacgaaaaaaacg

SEQ ID NO: 52323 - DNA, 50 bp, synthetic construct
  source 1..50: mol_type = other DNA
acacaacttaaattaatttaaccaattcttaaaaaaaccctaaaaccaca

SEQ ID NO: 52324 - DNA, 50 bp, synthetic construct
  source 1..50: mol_type = other DNA
gcgcgacttaaattaatttaaccgattcttaaaaaaaccctaaaaccacg

SEQ ID NO: 52325 - DNA, 50 bp, synthetic construct
  source 1..50: mol_type = other DNA
tatcaaatctaactccacactccctatatacacaaatatatatacacaca

SEQ ID NO: 52326 - DNA, 50 bp, synthetic construct
  source 1..50: mol_type = other DNA
tatcgaatctaactccacactccctatatacacaaatatatatacgcgcg

SEQ ID NO: 52327 - DNA, 50 bp, synthetic construct
  source 1..50: mol_type = other DNA
ctacataactcccatcactaaacaaaaacacattatcaactaccaaacca

SEQ ID NO: 52328 - DNA, 50 bp, synthetic construct
  source 1..50: mol_type = other DNA
ctacgtaactcccatcgctaaacaaaaacacgttatcaactaccaaaccg

SEQ ID NO: 52329 - DNA, 50 bp, synthetic construct
  source 1..50: mol_type = other DNA
catacataatcatactttaaaactaaactatctcaaacaaataattcaca

SEQ ID NO: 52330 - DNA, 50 bp, synthetic construct
  source 1..50: mol_type = other DNA
cgtacgtaatcgtactttaaaactaaactatctcgaacgaataattcacg

SEQ ID NO: 52331 - DNA, 50 bp, synthetic construct
  source 1..50: mol_type = other DNA
aaaaaatatcacatacataatcatactttaaaactaaactatctcaaaca

SEQ ID NO: 52332 - DNA, 50 bp, synthetic construct
  source 1..50: mol_type = other DNA
aaaaaatatcacgtacgtaatcgtactttaaaactaaactatctcgaacg

SEQ ID NO: 52333 - DNA, 50 bp, synthetic construct
  source 1..50: mol_type = other DNA
tcaaaaaaaatatcacatacataatcatactttaaaactaaactatctca

SEQ ID NO: 52334 - DNA, 50 bp, synthetic construct
  source 1..50: mol_type = other DNA
tcaaaaaaaatatcacgtacgtaatcgtactttaaaactaaactatctcg

SEQ ID NO: 52335 - DNA, 50 bp, synthetic construct
  source 1..50: mol_type = other DNA
cataacttcataaaaatacattatcaaaaaaaatatcacatacataatca

SEQ ID NO: 52336 - DNA, 50 bp, synthetic construct
  source 1..50: mol_type = other DNA
cataacttcataaaaatacattatcaaaaaaaatatcacgtacgtaatcg

SEQ ID NO: 52337 - DNA, 50 bp, synthetic construct
  source 1..50: mol_type = other DNA
acatttttataaatatcattataatataccaacacatatatataaaatca

SEQ ID NO: 52338 - DNA, 50 bp, synthetic construct
  source 1..50: mol_type = other DNA
acatttttataaatatcattataatataccgacacatatatataaaatcg

SEQ ID NO: 52339 - DNA, 50 bp, synthetic construct
  source 1..50: mol_type = other DNA
taattaaaaaataatacttaaccaaacacaataactcatacctataatca

SEQ ID NO: 52340 - DNA, 50 bp, synthetic construct
  source 1..50: mol_type = other DNA
taattaaaaaataatacttaaccgaacacaataactcatacctataatcg

SEQ ID NO: 52341 - DNA, 50 bp, synthetic construct
  source 1..50: mol_type = other DNA
ccttaaatttcccaaactaaaactaaccctacaattcccacccctttaca

SEQ ID NO: 52342 - DNA, 50 bp, synthetic construct
  source 1..50: mol_type = other DNA
ccttaaatttcccaaactaaaactaaccctacgattcccacccctttacg

SEQ ID NO: 52343 - DNA, 50 bp, synthetic construct
  source 1..50: mol_type = other DNA
aaatacaaaacttaaatccaaactcctcccactaaaccctactaacctca

SEQ ID NO: 52344 - DNA, 50 bp, synthetic construct
  source 1..50: mol_type = other DNA
aaatacaaaacttaaatccaaactcctcccgctaaaccctactaacctcg

SEQ ID NO: 52345 - DNA, 50 bp, synthetic construct
  source 1..50: mol_type = other DNA
tcaaccccaatactaatcaaaaaccataactataaaaactaaaaaaaaca

SEQ ID NO: 52346 - DNA, 50 bp, synthetic construct
  source 1..50: mol_type = other DNA
tcaaccccgatactaatcaaaaaccataactataaaaactaaaaaaaacg

SEQ ID NO: 52347 - DNA, 50 bp, synthetic construct
  source 1..50: mol_type = other DNA
caaaacaaaacaaaattacaacctccaaaaaaaacataaccccaaaaaca

SEQ ID NO: 52348 - DNA, 50 bp, synthetic construct
  source 1..50: mol_type = other DNA
cgaaacgaaacaaaattacaacctccgaaaaaaacgtaaccccgaaaacg

SEQ ID NO: 52349 - DNA, 50 bp, synthetic construct
  source 1..50: mol_type = other DNA
ttaaccaatcattactaaaaaacaaaaaaacaaacttaccaaaacaacca

SEQ ID NO: 52350 - DNA, 50 bp, synthetic construct
  source 1..50: mol_type = other DNA
ttaaccaatcgttactaaaaaacgaaaaaacgaacttaccgaaacgaccg

SEQ ID NO: 52351 - DNA, 50 bp, synthetic construct
  source 1..50: mol_type = other DNA
catccaaaaataatacccatttctaaaaaccaaacctcattaaccaatca

SEQ ID NO: 52352 - DNA, 50 bp, synthetic construct
  source 1..50: mol_type = other DNA
cgtccgaaaataatacccatttctaaaaaccaaacctcgttaaccaatcg

SEQ ID NO: 52353 - DNA, 50 bp, synthetic construct
  source 1..50: mol_type = other DNA
tcccataacctcaaaaacacaactaataaaactaccaaaaaccaaaaaca

SEQ ID NO: 52354 - DNA, 50 bp, synthetic construct
  source 1..50: mol_type = other DNA
tcccgtaacctcgaaaacgcaactaataaaactaccaaaaaccgaaaacg

SEQ ID NO: 52355 - DNA, 50 bp, synthetic construct
  source 1..50: mol_type = other DNA
taataaaaccacacatacaccctcaacttctaacaatcttaccaactaca

SEQ ID NO: 52356 - DNA, 50 bp, synthetic construct
  source 1..50: mol_type = other DNA
taataaaaccacacatacgccctcgacttctaacaatcttaccaactacg

SEQ ID NO: 52357 - DNA, 50 bp, synthetic construct
  source 1..50: mol_type = other DNA
caaaataaccaaaatcaataacaaaaaatacccacacatacacacactca

SEQ ID NO: 52358 - DNA, 50 bp, synthetic construct
  source 1..50: mol_type = other DNA
caaaataaccgaaatcaataacaaaaaatacccacgcatacgcacactcg

SEQ ID NO: 52359 - DNA, 50 bp, synthetic construct
  source 1..50: mol_type = other DNA
cacctcactatctccaaaataaccaaaatcaataacaaaaaatacccaca

SEQ ID NO: 52360 - DNA, 50 bp, synthetic construct
  source 1..50: mol_type = other DNA
cgcctcgctatctccaaaataaccgaaatcaataacaaaaaatacccacg

SEQ ID NO: 52361 - DNA, 50 bp, synthetic construct
  source 1..50: mol_type = other DNA
aaaaaaaaacaaatatacacatacataaacactccctaccactaacttca

SEQ ID NO: 52362 - DNA, 50 bp, synthetic construct
  source 1..50: mol_type = other DNA
aaaaaaaaacgaatatacgcatacgtaaacactccctaccactaacttcg

SEQ ID NO: 52363 - DNA, 50 bp, synthetic construct
  source 1..50: mol_type = other DNA
cataaacactccctaccactaacttcaattaccttaaaaacaacaaaaca

SEQ ID NO: 52364 - DNA, 50 bp, synthetic construct
  source 1..50: mol_type = other DNA
cgtaaacactccctaccactaacttcgattaccttaaaaacaacgaaacg

SEQ ID NO: 52365 - DNA, 50 bp, synthetic construct
  source 1..50: mol_type = other DNA
caatacctaccctcaaaaaacttaaaaaaccaaaaacttacaaaaaccca

SEQ ID NO: 52366 - DNA, 50 bp, synthetic construct
  source 1..50: mol_type = other DNA
caatacctaccctcgaaaaacttaaaaaaccaaaaacttacaaaaacccg

SEQ ID NO: 52367 - DNA, 50 bp, synthetic construct
  source 1..50: mol_type = other DNA
ccttcatatactttaaaaatataaaacaaccaaaaacaatacctcacaca

SEQ ID NO: 52368 - DNA, 50 bp, synthetic construct
  source 1..50: mol_type = other DNA
ccttcatatactttaaaaatataaaacgaccgaaaacgatacctcacacg

SEQ ID NO: 52369 - DNA, 50 bp, synthetic construct
  source 1..50: mol_type = other DNA
aaataaaaaaaccaacaactacaaacctcaaaacataaccaaacaaacca

SEQ ID NO: 52370 - DNA, 50 bp, synthetic construct
  source 1..50: mol_type = other DNA
aaataaaaaaaccaacgactacaaacctcaaaacgtaaccgaacgaaccg

SEQ ID NO: 52371 - DNA, 50 bp, synthetic construct
  source 1..50: mol_type = other DNA
tttccaaataaaaaaaccaacaactacaaacctcaaaacataaccaaaca

SEQ ID NO: 52372 - DNA, 50 bp, synthetic construct
  source 1..50: mol_type = other DNA
tttccaaataaaaaaaccaacgactacaaacctcaaaacgtaaccgaacg

SEQ ID NO: 52373 - DNA, 50 bp, synthetic construct
  source 1..50: mol_type = other DNA
cactatcactaaaatcacaacactttactataactttataaaactctcca

SEQ ID NO: 52374 - DNA, 50 bp, synthetic construct
  source 1..50: mol_type = other DNA
cgctatcactaaaatcgcaacgctttactataactttataaaactctccg

SEQ ID NO: 52375 - DNA, 50 bp, synthetic construct
  source 1..50: mol_type = other DNA
aataaacataaactccaaaaaaacaactcaacaaaacaaacaccaaaaca

SEQ ID NO: 52376 - DNA, 50 bp, synthetic construct
  source 1..50: mol_type = other DNA
aataaacgtaaactccaaaaaaacgactcgacgaaacgaacaccaaaacg

SEQ ID NO: 52377 - DNA, 50 bp, synthetic construct
  source 1..50: mol_type = other DNA
aactcaacaatacttctaactccatatccctcactactttaacttcaaca

SEQ ID NO: 52378 - DNA, 50 bp, synthetic construct
  source 1..50: mol_type = other DNA
aactcgacaatacttctaactccgtatccctcactactttaacttcaacg

SEQ ID NO: 52379 - DNA, 50 bp, synthetic construct
  source 1..50: mol_type = other DNA
ctttcactacccactacaactcctctacaataaaaaataaaacaaaaaca

SEQ ID NO: 52380 - DNA, 50 bp, synthetic construct
  source 1..50: mol_type = other DNA
ctttcactacccgctacgactcctctacaataaaaaataaaacaaaaacg

SEQ ID NO: 52381 - DNA, 50 bp, synthetic construct
  source 1..50: mol_type = other DNA
aaattaatatacacccctaccccactctctactataaaaaaatcacaaca

SEQ ID NO: 52382 - DNA, 50 bp, synthetic construct
  source 1..50: mol_type = other DNA
aaattaatatacgcccctaccccactctctactataaaaaaatcgcaacg

SEQ ID NO: 52383 - DNA, 50 bp, synthetic construct
  source 1..50: mol_type = other DNA
taaaactaacctaaacacaccaacaacaaaaaaaccaaaaaaaataaaca

SEQ ID NO: 52384 - DNA, 50 bp, synthetic construct
  source 1..50: mol_type = other DNA
taaaactaacctaaacacaccaacaacaaaaaaaccgaaaaaaataaacg

SEQ ID NO: 52385 - DNA, 50 bp, synthetic construct
  source 1..50: mol_type = other DNA
taaacaaaactctccaaaaacacctcactatcaactctaaaactatcaca

SEQ ID NO: 52386 - DNA, 50 bp, synthetic construct
  source 1..50: mol_type = other DNA
taaacgaaactctccgaaaacacctcactatcaactctaaaactatcgcg

SEQ ID NO: 52387 - DNA, 50 bp, synthetic construct
  source 1..50: mol_type = other DNA
aaatttaacatatatccacaaccactctaataaaaatacccccacccaca

SEQ ID NO: 52388 - DNA, 50 bp, synthetic construct
  source 1..50: mol_type = other DNA
aaatttaacgtatatccacaaccgctctaataaaaatacccccacccacg

SEQ ID NO: 52389 - DNA, 50 bp, synthetic construct
  source 1..50: mol_type = other DNA
aattccacaaaaccaaccaatctcaaaataaaacaatcaaatccaccaca

SEQ ID NO: 52390 - DNA, 50 bp, synthetic construct
  source 1..50: mol_type = other DNA
aattccacaaaaccaaccaatctcaaaataaaacaatcgaatccgccgcg

SEQ ID NO: 52391 - DNA, 50 bp, synthetic construct
  source 1..50: mol_type = other DNA
tctcaaaataaaacaatcaaatccaccacaacacaacaactattcaaaca

SEQ ID NO: 52392 - DNA, 50 bp, synthetic construct
  source 1..50: mol_type = other DNA
tctcaaaataaaacaatcgaatccgccgcgacacaacaactattcaaacg

SEQ ID NO: 52393 - DNA, 50 bp, synthetic construct
  source 1..50: mol_type = other DNA
tcaaacatcaaaaacaaaaaccaaaccactaaacaaacaaaacaatacca

SEQ ID NO: 52394 - DNA, 50 bp, synthetic construct
  source 1..50: mol_type = other DNA
tcaaacgtcgaaaacgaaaaccgaaccgctaaacgaacaaaacaataccg

SEQ ID NO: 52395 - DNA, 50 bp, synthetic construct
  source 1..50: mol_type = other DNA
tttataaccaaacaaccacaaaacataacacattcaaaaaaaacaaatca

SEQ ID NO: 52396 - DNA, 50 bp, synthetic construct
  source 1..50: mol_type = other DNA
tttataaccgaacgaccgcgaaacgtaacacgttcaaaaaaaacgaatcg

SEQ ID NO: 52397 - DNA, 50 bp, synthetic construct
  source 1..50: mol_type = other DNA
caaaacataacacctaacaaaacataaccaaaattaaactaaaactacca

SEQ ID NO: 52398 - DNA, 50 bp, synthetic construct
  source 1..50: mol_type = other DNA
cgaaacgtaacgcctaacgaaacgtaaccgaaattaaactaaaactaccg

SEQ ID NO: 52399 - DNA, 50 bp, synthetic construct
  source 1..50: mol_type = other DNA
tctcaaacaccaactaaaacaactaaaaaaacacccaactaaaactatca

SEQ ID NO: 52400 - DNA, 50 bp, synthetic construct
  source 1..50: mol_type = other DNA
tctcaaacgccaactaaaacaactaaaaaaacgcccgactaaaactatcg

SEQ ID NO: 52401 - DNA, 50 bp, synthetic construct
  source 1..50: mol_type = other DNA
acaaaaaaatcactctcaaacaccaactaaaacaactaaaaaaacaccca

SEQ ID NO: 52402 - DNA, 50 bp, synthetic construct
  source 1..50: mol_type = other DNA
acgaaaaaatcgctctcaaacgccaactaaaacaactaaaaaaacgcccg

SEQ ID NO: 52403 - DNA, 50 bp, synthetic construct
  source 1..50: mol_type = other DNA
tggtttatatttgtaattgttgtattttgggaggttaaagtgggtgaatt

SEQ ID NO: 52404 - DNA, 50 bp, synthetic construct
  source 1..50: mol_type = other DNA
tggtttatatttgtaatcgttgtattttgggaggttaaagtgggtgaatc

SEQ ID NO: 52405 - DNA, 50 bp, synthetic construct
  source 1..50: mol_type = other DNA
aatcccatctctactaaaatacaaaaattaactaaatataatcacaaaca

SEQ ID NO: 52406 - DNA, 50 bp, synthetic construct
  source 1..50: mol_type = other DNA
aatcccgtctctactaaaatacaaaaattaactaaatataatcacaaacg

SEQ ID NO: 52407 - DNA, 50 bp, synthetic construct
  source 1..50: mol_type = other DNA
ctctaatcctttttaaaaaaaaactaaccaactaaacaaaacacacaaca

SEQ ID NO: 52408 - DNA, 50 bp, synthetic construct
  source 1..50: mol_type = other DNA
ctctaatcctttttaaaaaaaaactaaccaactaaacaaaacacacaacg

SEQ ID NO: 52409 - DNA, 50 bp, synthetic construct
  source 1..50: mol_type = other DNA
aatattataccaccaataaataaaatacatctaatatacacccaccacca

SEQ ID NO: 52410 - DNA, 50 bp, synthetic construct
  source 1..50: mol_type = other DNA
aatattataccgccaataaataaaatacgtctaatatacacccgccaccg

SEQ ID NO: 52411 - DNA, 50 bp, synthetic construct
  source 1..50: mol_type = other DNA
aacaaatatacatcaaacacattttatctactaacaacacaatactccca

SEQ ID NO: 52412 - DNA, 50 bp, synthetic construct
  source 1..50: mol_type = other DNA
aacgaatatacatcaaacgcattttatctactaacgacacaatactcccg

SEQ ID NO: 52413 - DNA, 50 bp, synthetic construct
  source 1..50: mol_type = other DNA
acacaaattaacaaaccaaaaaaaaatttacaccaatcctcctacaaaca

SEQ ID NO: 52414 - DNA, 50 bp, synthetic construct
  source 1..50: mol_type = other DNA
acacgaattaacgaaccgaaaaaaaatttacaccgatcctcctacgaacg

SEQ ID NO: 52415 - DNA, 50 bp, synthetic construct
  source 1..50: mol_type = other DNA
ctacaaaacaaaaaaacactcacaaaaaaaccaatacaaacctcctctca

SEQ ID NO: 52416 - DNA, 50 bp, synthetic construct
  source 1..50: mol_type = other DNA
ctacaaaacaaaaaaacgctcgcaaaaaaaccgatacaaacctcctctcg

SEQ ID NO: 52417 - DNA, 50 bp, synthetic construct
  source 1..50: mol_type = other DNA
aaaaaccccaaacactaaactcctcaaacacccaacttaaactaaaaaca

SEQ ID NO: 52418 - DNA, 50 bp, synthetic construct
  source 1..50: mol_type = other DNA
aaaaaccccgaacgctaaactcctcaaacacccaacttaaactaaaaacg

SEQ ID NO: 52419 - DNA, 50 bp, synthetic construct
  source 1..50: mol_type = other DNA
caaaaaacaaaaatccaaacacattcctcaccataacacttacaacacca

SEQ ID NO: 52420 - DNA, 50 bp, synthetic construct
  source 1..50: mol_type = other DNA
caaaaaacgaaaatccaaacgcattcctcaccataacacttacaacaccg

SEQ ID NO: 52421 - DNA, 50 bp, synthetic construct
  source 1..50: mol_type = other DNA
acattacttaaaaactcaaacatacacaaaactccaaattcaatttccca

SEQ ID NO: 52422 - DNA, 50 bp, synthetic construct
  source 1..50: mol_type = other DNA
acattacttaaaaactcgaacgtacgcaaaactccgaattcaatttcccg

SEQ ID NO: 52423 - DNA, 50 bp, synthetic construct
  source 1..50: mol_type = other DNA
cttcccaaaacaataatataaaaaacacccaataaattacaaaaaaaaca

SEQ ID NO: 52424 - DNA, 50 bp, synthetic construct
  source 1..50: mol_type = other DNA
cttcccaaaacaataatataaaaaacgcccaataaattacgaaaaaaacg

SEQ ID NO: 52425 - DNA, 50 bp, synthetic construct
  source 1..50: mol_type = other DNA
ctataaactaaaaaaaacaaaattaccttcaaacttctaatctccaacca

SEQ ID NO: 52426 - DNA, 50 bp, synthetic construct
  source 1..50: mol_type = other DNA
ctataaactaaaaaaaacgaaattaccttcaaacttctaatctccaaccg

SEQ ID NO: 52427 - DNA, 50 bp, synthetic construct
  source 1..50: mol_type = other DNA
caacaaaactatcaaaatttataatccaccaacaaaataaacaaactaca

SEQ ID NO: 52428 - DNA, 50 bp, synthetic construct
  source 1..50: mol_type = other DNA
cgacaaaactatcgaaatttataatccaccgacaaaataaacgaactacg

SEQ ID NO: 52429 - DNA, 50 bp, synthetic construct
  source 1..50: mol_type = other DNA
aaacaatcaatattttcacaacaaaataaaacaaacaatacccaaaatca

SEQ ID NO: 52430 - DNA, 50 bp, synthetic construct
  source 1..50: mol_type = other DNA
aaacgatcaatattttcgcaacgaaataaaacaaacaatacccgaaatcg

SEQ ID NO: 52431 - DNA, 50 bp, synthetic construct
  source 1..50: mol_type = other DNA
tttttccttacacccatcctaaatctcctaaaaaacaaaacaacattcca

SEQ ID NO: 52432 - DNA, 50 bp, synthetic construct
  source 1..50: mol_type = other DNA
tttttccttacacccatcctaaatctcctaaaaaacaaaacgacgttccg

SEQ ID NO: 52433 - DNA, 50 bp, synthetic construct
  source 1..50: mol_type = other DNA
aaaaaaaataacaaaaacatctacacctacccaaatacaaactaacctca

SEQ ID NO: 52434 - DNA, 50 bp, synthetic construct
  source 1..50: mol_type = other DNA
aaaaaaaataacgaaaacgtctacgcctacccaaatacaaactaacctcg

SEQ ID NO: 52435 - DNA, 50 bp, synthetic construct
  source 1..50: mol_type = other DNA
cctaaaataaaaccaacaattccatacacacccaacttcacatctcacca

SEQ ID NO: 52436 - DNA, 50 bp, synthetic construct
  source 1..50: mol_type = other DNA
cctaaaataaaaccaacaattccgtacacacccaacttcacatctcaccg

SEQ ID NO: 52437 - DNA, 50 bp, synthetic construct
  source 1..50: mol_type = other DNA
aaatcaacacaacaaactatttctcaaccataaaaaaacacaaacataca

SEQ ID NO: 52438 - DNA, 50 bp, synthetic construct
  source 1..50: mol_type = other DNA
aaatcaacacaacgaactatttctcaaccataaaaaaacacgaacgtacg

SEQ ID NO: 52439 - DNA, 50 bp, synthetic construct
  source 1..50: mol_type = other DNA
aaaaaacccaaaatacctaccaaaatcctccccactactaaaaacacaca

SEQ ID NO: 52440 - DNA, 50 bp, synthetic construct
  source 1..50: mol_type = other DNA
aaaaaacccaaaatacctaccaaaatcctccccactactaaaaacgcacg

SEQ ID NO: 52441 - DNA, 50 bp, synthetic construct
  source 1..50: mol_type = other DNA
ctctaacaattcaaaaaaaaataatccctatttctaataccaattacaca

SEQ ID NO: 52442 - DNA, 50 bp, synthetic construct
  source 1..50: mol_type = other DNA
ctctaacgattcgaaaaaaaataatccctatttctaataccaattacacg

SEQ ID NO: 52443 - DNA, 50 bp, synthetic construct
  source 1..50: mol_type = other DNA
ctaaaaaacctacacttaaactctacaaaaataaacaaaactaaaccaca

SEQ ID NO: 52444 - DNA, 50 bp, synthetic construct
  source 1..50: mol_type = other DNA
ctaaaaaacctacgcttaaactctacgaaaataaacaaaactaaaccgcg

SEQ ID NO: 52445 - DNA, 50 bp, synthetic construct
  source 1..50: mol_type = other DNA
cacaaaatacataataacataaaccataaaccatactccccaaaaaacca

SEQ ID NO: 52446 - DNA, 50 bp, synthetic construct
  source 1..50: mol_type = other DNA
cacgaaatacataataacgtaaaccgtaaaccgtactccccgaaaaaccg

SEQ ID NO: 52447 - DNA, 50 bp, synthetic construct
  source 1..50: mol_type = other DNA
ataactacaacctatccaaatacacacaaaatacataataacataaacca

SEQ ID NO: 52448 - DNA, 50 bp, synthetic construct
  source 1..50: mol_type = other DNA
ataactacgacctatccgaatacacacgaaatacataataacgtaaaccg

SEQ ID NO: 52449 - DNA, 50 bp, synthetic construct
  source 1..50: mol_type = other DNA
ggagatgtttgattttattgagttgtttgagttgtttaaattttattatt

SEQ ID NO: 52450 - DNA, 50 bp, synthetic construct
  source 1..50: mol_type = other DNA
ggagacgtttgattttatcgagttgttcgagttgtttaaattttattatc

SEQ ID NO: 52451 - DNA, 50 bp, synthetic construct
  source 1..50: mol_type = other DNA
agatttaaagttagtttgtagttagttaaaaattagtttgtggtttggtt

SEQ ID NO: 52452 - DNA, 50 bp, synthetic construct
  source 1..50: mol_type = other DNA
agatttaaagttagtttgtagttagttaaaaattagtttgtggtttggtc

SEQ ID NO: 52453 - DNA, 50 bp, synthetic construct
  source 1..50: mol_type = other DNA
ctaaactaacttatcacctttaactacaaaaacataaaaaaaactcaaca

SEQ ID NO: 52454 - DNA, 50 bp, synthetic construct
  source 1..50: mol_type = other DNA
ctaaactaacttatcacctttaactacgaaaacgtaaaaaaaactcaacg

SEQ ID NO: 52455 - DNA, 50 bp, synthetic construct
  source 1..50: mol_type = other DNA
ctactaaaacaacccctataaaaaccacaatacaaaacatcctattctca

SEQ ID NO: 52456 - DNA, 50 bp, synthetic construct
  source 1..50: mol_type = other DNA
ctactaaaacgacccctataaaaaccacaatacaaaacgtcctattctcg

SEQ ID NO: 52457 - DNA, 50 bp, synthetic construct
  source 1..50: mol_type = other DNA
tctccaaaataattaaaaccctaaaaacctaacatctcacctactaccca

SEQ ID NO: 52458 - DNA, 50 bp, synthetic construct
  source 1..50: mol_type = other DNA
tctccgaaataattaaaaccctaaaaacctaacgtctcacctactacccg

SEQ ID NO: 52459 - DNA, 50 bp, synthetic construct
  source 1..50: mol_type = other DNA
tcccccacaaaaccatattaacctcaaaaaaaactaaataaacaacaaca

SEQ ID NO: 52460 - DNA, 50 bp, synthetic construct
  source 1..50: mol_type = other DNA
tcccccacgaaaccgtattaacctcgaaaaaaactaaataaacgacgacg

SEQ ID NO: 52461 - DNA, 50 bp, synthetic construct
  source 1..50: mol_type = other DNA
aactcccccacaaaaccatattaacctcaaaaaaaactaaataaacaaca

SEQ ID NO: 52462 - DNA, 50 bp, synthetic construct
  source 1..50: mol_type = other DNA
aactcccccacgaaaccgtattaacctcgaaaaaaactaaataaacgacg

SEQ ID NO: 52463 - DNA, 50 bp, synthetic construct
  source 1..50: mol_type = other DNA
tttcaaaaccaacacaatctcataaaaaaacctaaactctctaaaaacca

SEQ ID NO: 52464 - DNA, 50 bp, synthetic construct
  source 1..50: mol_type = other DNA
tttcgaaaccaacacgatctcgtaaaaaaacctaaactctctaaaaaccg

SEQ ID NO: 52465 - DNA, 50 bp, synthetic construct
  source 1..50: mol_type = other DNA
acaaatatcactatcctccatcttaaaactaaaaaaaccaaaaccaaaca

SEQ ID NO: 52466 - DNA, 50 bp, synthetic construct
  source 1..50: mol_type = other DNA
acaaatatcgctatcctccatcttaaaactaaaaaaaccgaaaccgaacg

SEQ ID NO: 52467 - DNA, 50 bp, synthetic construct
  source 1..50: mol_type = other DNA
taaaacaaatatcactatcctccatcttaaaactaaaaaaaccaaaacca

SEQ ID NO: 52468 - DNA, 50 bp, synthetic construct
  source 1..50: mol_type = other DNA
taaaacaaatatcgctatcctccatcttaaaactaaaaaaaccgaaaccg

SEQ ID NO: 52469 - DNA, 50 bp, synthetic construct
  source 1..50: mol_type = other DNA
aaacaaacaaataacctaattaacaaatatatcataaaattcaaaattca

SEQ ID NO: 52470 - DNA, 50 bp, synthetic construct
  source 1..50: mol_type = other DNA
aaacaaacaaataacctaattaacaaatatatcgtaaaattcgaaattcg

SEQ ID NO: 52471 - DNA, 50 bp, synthetic construct
  source 1..50: mol_type = other DNA
taacaaatatatcataaaattcaaaattcacctccaactccaaaaataca

SEQ ID NO: 52472 - DNA, 50 bp, synthetic construct
  source 1..50: mol_type = other DNA
taacaaatatatcgtaaaattcgaaattcgcctccaactccgaaaatacg

SEQ ID NO: 52473 - DNA, 50 bp, synthetic construct
  source 1..50: mol_type = other DNA
actatcctatacatctctcaaatataaacacctctaaaactcataattca

SEQ ID NO: 52474 - DNA, 50 bp, synthetic construct
  source 1..50: mol_type = other DNA
actatcctatacgtctctcgaatataaacacctctaaaactcgtaattcg

SEQ ID NO: 52475 - DNA, 50 bp, synthetic construct
  source 1..50: mol_type = other DNA
aaattaacatctcattacaaaaaaatatccaaaaaacacaaaaaaactca

SEQ ID NO: 52476 - DNA, 50 bp, synthetic construct
  source 1..50: mol_type = other DNA
aaattaacatctcgttacaaaaaaatatccaaaaaacgcgaaaaaactcg

SEQ ID NO: 52477 - DNA, 50 bp, synthetic construct
  source 1..50: mol_type = other DNA
atcaccaaaaaaattaacatctcattacaaaaaaatatccaaaaaacaca

SEQ ID NO: 52478 - DNA, 50 bp, synthetic construct
  source 1..50: mol_type = other DNA
atcgccgaaaaaattaacatctcgttacaaaaaaatatccaaaaaacgcg

SEQ ID NO: 52479 - DNA, 50 bp, synthetic construct
  source 1..50: mol_type = other DNA
aaaacaaaaacctatttaaaaaaataatcaccaaaaaaattaacatctca

SEQ ID NO: 52480 - DNA, 50 bp, synthetic construct
  source 1..50: mol_type = other DNA
aaaacgaaaacctatttaaaaaaataatcgccgaaaaaattaacatctcg

SEQ ID NO: 52481 - DNA, 50 bp, synthetic construct
  source 1..50: mol_type = other DNA
cctaaacctcaacacaaacaaaaacaaaaacctatttaaaaaaataatca

SEQ ID NO: 52482 - DNA, 50 bp, synthetic construct
  source 1..50: mol_type = other DNA
cctaaacctcaacgcgaacgaaaacgaaaacctatttaaaaaaataatcg

SEQ ID NO: 52483 - DNA, 50 bp, synthetic construct
  source 1..50: mol_type = other DNA
ctcaataacttctcaacaaattaacaacaacaacacaaccctaatcatca

SEQ ID NO: 52484 - DNA, 50 bp, synthetic construct
  source 1..50: mol_type = other DNA
ctcaataacttctcgacaaattaacaacaacaacacgaccctaatcgtcg

SEQ ID NO: 52485 - DNA, 50 bp, synthetic construct
  source 1..50: mol_type = other DNA
aataacttctcaacaaattaacaacaacaacacaaccctaatcatcatca

SEQ ID NO: 52486 - DNA, 50 bp, synthetic construct
  source 1..50: mol_type = other DNA
aataacttctcgacaaattaacaacaacaacacgaccctaatcgtcgtcg

SEQ ID NO: 52487 - DNA, 50 bp, synthetic construct
  source 1..50: mol_type = other DNA
aaataaaaacaaataaaaaaaaccaaacacccaacaaaaaaaacccccca

SEQ ID NO: 52488 - DNA, 50 bp, synthetic construct
  source 1..50: mol_type = other DNA
aaataaaaacgaataaaaaaaaccaaacgcccaacgaaaaaaaccccccg

SEQ ID NO: 52489 - DNA, 50 bp, synthetic construct
  source 1..50: mol_type = other DNA
taaaaacaaataaaaaaaaccaaacacccaacaaaaaaaaccccccacca

SEQ ID NO: 52490 - DNA, 50 bp, synthetic construct
  source 1..50: mol_type = other DNA
taaaaacgaataaaaaaaaccaaacgcccaacgaaaaaaaccccccgccg

SEQ ID NO: 52491 - DNA, 50 bp, synthetic construct
  source 1..50: mol_type = other DNA
acttaattctcccacaaactacaaacaaaactaaaaacccaaaaaacaca

SEQ ID NO: 52492 - DNA, 50 bp, synthetic construct
  source 1..50: mol_type = other DNA
acttaattctcccacgaactacaaacgaaactaaaaacccgaaaaacgcg

SEQ ID NO: 52493 - DNA, 50 bp, synthetic construct
  source 1..50: mol_type = other DNA
ccaaatttaacttaattctcccacaaactacaaacaaaactaaaaaccca

SEQ ID NO: 52494 - DNA, 50 bp, synthetic construct
  source 1..50: mol_type = other DNA
ccgaatttaacttaattctcccacgaactacaaacgaaactaaaaacccg

SEQ ID NO: 52495 - DNA, 50 bp, synthetic construct
  source 1..50: mol_type = other DNA
aacaaaaatcccatccaaatttaacttaattctcccacaaactacaaaca

SEQ ID NO: 52496 - DNA, 50 bp, synthetic construct
  source 1..50: mol_type = other DNA
gacaaaaatcccgtccgaatttaacttaattctcccacgaactacaaacg

SEQ ID NO: 52497 - DNA, 50 bp, synthetic construct
  source 1..50: mol_type = other DNA
acccccaactccacttacaactcataaaaaaatcaaattaaactcaaaca

SEQ ID NO: 52498 - DNA, 50 bp, synthetic construct
  source 1..50: mol_type = other DNA
acccccaactccgcttacaactcgtaaaaaaatcaaattaaactcgaacg

SEQ ID NO: 52499 - DNA, 50 bp, synthetic construct
  source 1..50: mol_type = other DNA
ttacaactcataaaaaaatcaaattaaactcaaacaaaactcctaccaca

SEQ ID NO: 52500 - DNA, 50 bp, synthetic construct
  source 1..50: mol_type = other DNA
ttacaactcgtaaaaaaatcaaattaaactcgaacgaaactcctaccgcg

SEQ ID NO: 52501 - DNA, 50 bp, synthetic construct
  source 1..50: mol_type = other DNA
aactcataaaaaaatcaaattaaactcaaacaaaactcctaccacaacca

SEQ ID NO: 52502 - DNA, 50 bp, synthetic construct
  source 1..50: mol_type = other DNA
aactcgtaaaaaaatcaaattaaactcgaacgaaactcctaccgcgaccg

SEQ ID NO: 52503 - DNA, 50 bp, synthetic construct
  source 1..50: mol_type = other DNA
ttaaaacaaaatctctcactttatcacccacactaaaatacaataacaca

SEQ ID NO: 52504 - DNA, 50 bp, synthetic construct
  source 1..50: mol_type = other DNA
ttaaaacaaaatctctcgctttatcacccacgctaaaatacaataacacg

SEQ ID NO: 52505 - DNA, 50 bp, synthetic construct
  source 1..50: mol_type = other DNA
caaacatacaccatcacacccaactaatttttttatatttaataaaaaca

SEQ ID NO: 52506 - DNA, 50 bp, synthetic construct
  source 1..50: mol_type = other DNA
caaacatacgccatcacgcccaactaatttttttatatttaataaaaacg

SEQ ID NO: 52507 - DNA, 50 bp, synthetic construct
  source 1..50: mol_type = other DNA
taaaacctcatctctactaaatacaaaaaaattaactaaacataataaca

SEQ ID NO: 52508 - DNA, 50 bp, synthetic construct
  source 1..50: mol_type = other DNA
taaaacctcgtctctactaaatacaaaaaaattaactaaacgtaataacg

SEQ ID NO: 52509 - DNA, 50 bp, synthetic construct
  source 1..50: mol_type = other DNA
aaaacaaaatttcattcttattactcaaactaaaataaacaacaataaca

SEQ ID NO: 52510 - DNA, 50 bp, synthetic construct
  source 1..50: mol_type = other DNA
aaaacgaaatttcgttcttattactcaaactaaaataaacaacaataacg

SEQ ID NO: 52511 - DNA, 50 bp, synthetic construct
  source 1..50: mol_type = other DNA
tattacccaaaataacacacataccaaaaaatcataaaaacccacataca

SEQ ID NO: 52512 - DNA, 50 bp, synthetic construct
  source 1..50: mol_type = other DNA
tattacccaaaataacacgcataccaaaaaatcgtaaaaacccacgtacg

SEQ ID NO: 52513 - DNA, 50 bp, synthetic construct
  source 1..50: mol_type = other DNA
cacaaaacaactaaaaactataatcccccaatttccctaaaaaccaaaca

SEQ ID NO: 52514 - DNA, 50 bp, synthetic construct
  source 1..50: mol_type = other DNA
cacaaaacgactaaaaactataatcccccgatttccctaaaaaccaaacg

SEQ ID NO: 52515 - DNA, 50 bp, synthetic construct
  source 1..50: mol_type = other DNA
taaaaaccaaacaaaaacaaccaaaaataacactacaattaacaacaaca

SEQ ID NO: 52516 - DNA, 50 bp, synthetic construct
  source 1..50: mol_type = other DNA
taaaaaccaaacgaaaacgaccgaaaataacgctacgattaacaacgacg

SEQ ID NO: 52517 - DNA, 50 bp, synthetic construct
  source 1..50: mol_type = other DNA
ccaaaacctaaaccataaaactaacaaacataaaaacaacaaccaactca

SEQ ID NO: 52518 - DNA, 50 bp, synthetic construct
  source 1..50: mol_type = other DNA
ccgaaacctaaaccataaaactaacgaacgtaaaaacgacaaccaactcg

SEQ ID NO: 52519 - DNA, 50 bp, synthetic construct
  source 1..50: mol_type = other DNA
aaaccataaaactaacaaacataaaaacaacaaccaactcacaaaataca

SEQ ID NO: 52520 - DNA, 50 bp, synthetic construct
  source 1..50: mol_type = other DNA
aaaccataaaactaacgaacgtaaaaacgacaaccaactcgcaaaatacg

SEQ ID NO: 52521 - DNA, 50 bp, synthetic construct
  source 1..50: mol_type = other DNA
ctctcttaaaaaaaccaaataaaacaaaaacaatcacaccccaataacca

SEQ ID NO: 52522 - DNA, 50 bp, synthetic construct
  source 1..50: mol_type = other DNA
ctctcttaaaaaaaccgaataaaacgaaaacgatcgcgccccaataaccg

SEQ ID NO: 52523 - DNA, 50 bp, synthetic construct
  source 1..50: mol_type = other DNA
aaaaaaacaaccctctcttaaaaaaaccaaataaaacaaaaacaatcaca

SEQ ID NO: 52524 - DNA, 50 bp, synthetic construct
  source 1..50: mol_type = other DNA
aaaaaaacaaccctctcttaaaaaaaccgaataaaacgaaaacgatcgcg

SEQ ID NO: 52525 - DNA, 50 bp, synthetic construct
  source 1..50: mol_type = other DNA
aaaaaaaaacaaccctctcttaaaaaaaccaaataaaacaaaaacaatca

SEQ ID NO: 52526 - DNA, 50 bp, synthetic construct
  source 1..50: mol_type = other DNA
aaaaaaaaacaaccctctcttaaaaaaaccgaataaaacgaaaacgatcg

SEQ ID NO: 52527 - DNA, 50 bp, synthetic construct
  source 1..50: mol_type = other DNA
aaaaaaacaacacaaataaaccctcaacacatatttataatataaacaca

SEQ ID NO: 52528 - DNA, 50 bp, synthetic construct
  source 1..50: mol_type = other DNA
aaaaaaacgacgcaaataaaccctcgacacgtatttataatataaacgcg

SEQ ID NO: 52529 - DNA, 50 bp, synthetic construct
  source 1..50: mol_type = other DNA
aaaaaaaaacaacacaaataaaccctcaacacatatttataatataaaca

SEQ ID NO: 52530 - DNA, 50 bp, synthetic construct
  source 1..50: mol_type = other DNA
aaaaaaaaacgacgcaaataaaccctcgacacgtatttataatataaacg

SEQ ID NO: 52531 - DNA, 50 bp, synthetic construct
  source 1..50: mol_type = other DNA
taacttcacccaacaaaaataaaataaaacacatccacactacaaataca

SEQ ID NO: 52532 - DNA, 50 bp, synthetic construct
  source 1..50: mol_type = other DNA
taacttcacccaacaaaaataaaataaaacgcgtccacactacaaatacg

SEQ ID NO: 52533 - DNA, 50 bp, synthetic construct
  source 1..50: mol_type = other DNA
taaaataaaacacatccacactacaaatacatatcaaaaatttatctaca

SEQ ID NO: 52534 - DNA, 50 bp, synthetic construct
  source 1..50: mol_type = other DNA
taaaataaaacgcgtccacactacaaatacgtatcgaaaatttatctacg

SEQ ID NO: 52535 - DNA, 50 bp, synthetic construct
  source 1..50: mol_type = other DNA
aataaaacacatccacactacaaatacatatcaaaaatttatctacacca

SEQ ID NO: 52536 - DNA, 50 bp, synthetic construct
  source 1..50: mol_type = other DNA
aataaaacgcgtccacactacaaatacgtatcgaaaatttatctacgccg

SEQ ID NO: 52537 - DNA, 50 bp, synthetic construct
  source 1..50: mol_type = other DNA
aaatacatatcaaaaatttatctacaccatcctttcctctataaaaaaca

SEQ ID NO: 52538 - DNA, 50 bp, synthetic construct
  source 1..50: mol_type = other DNA
aaatacgtatcgaaaatttatctacgccgtcctttcctctataaaaaacg

SEQ ID NO: 52539 - DNA, 50 bp, synthetic construct
  source 1..50: mol_type = other DNA
taactccacctaaattctaaaccatcccttcctaccaaaactaaaatcca

SEQ ID NO: 52540 - DNA, 50 bp, synthetic construct
  source 1..50: mol_type = other DNA
taactccgcctaaattctaaaccatcccttcctaccaaaactaaaatccg

SEQ ID NO: 52541 - DNA, 50 bp, synthetic construct
  source 1..50: mol_type = other DNA
aaaacaaaacacaaaacctcaaaaaacaaaaccttaaacctcaaaaaaca

SEQ ID NO: 52542 - DNA, 50 bp, synthetic construct
  source 1..50: mol_type = other DNA
aaaacgaaacacgaaacctcgaaaaacgaaaccttaaacctcgaaaaacg

SEQ ID NO: 52543 - DNA, 50 bp, synthetic construct
  source 1..50: mol_type = other DNA
ccaccccaattaaacaaatttaccaaaaaaaacctaacctactaaccaca

SEQ ID NO: 52544 - DNA, 50 bp, synthetic construct
  source 1..50: mol_type = other DNA
ccgccccaattaaacaaatttaccgaaaaaaacctaacctactaaccgcg

SEQ ID NO: 52545 - DNA, 50 bp, synthetic construct
  source 1..50: mol_type = other DNA
ccccaccccaattaaacaaatttaccaaaaaaaacctaacctactaacca

SEQ ID NO: 52546 - DNA, 50 bp, synthetic construct
  source 1..50: mol_type = other DNA
ccccgccccaattaaacaaatttaccgaaaaaaacctaacctactaaccg

SEQ ID NO: 52547 - DNA, 50 bp, synthetic construct
  source 1..50: mol_type = other DNA
caacaaaccaaactcccctcaacaaacctatctaattaaaacaaaaaaca

SEQ ID NO: 52548 - DNA, 50 bp, synthetic construct
  source 1..50: mol_type = other DNA
caacaaaccaaactcccctcgacaaacctatctaattaaaacgaaaaacg

SEQ ID NO: 52549 - DNA, 50 bp, synthetic construct
  source 1..50: mol_type = other DNA
atctaattaaaacaaaaaacaaaacttcctcctctaaaaaccataccaca

SEQ ID NO: 52550 - DNA, 50 bp, synthetic construct
  source 1..50: mol_type = other DNA
atctaattaaaacgaaaaacgaaacttcctcctctaaaaaccgtaccgcg

SEQ ID NO: 52551 - DNA, 50 bp, synthetic construct
  source 1..50: mol_type = other DNA
ataactaaaatactcaataccaacatcccccaataaccttaaccccaaca

SEQ ID NO: 52552 - DNA, 50 bp, synthetic construct
  source 1..50: mol_type = other DNA
ataactaaaatactcaataccaacatcccccaataaccttaaccccgacg

SEQ ID NO: 52553 - DNA, 50 bp, synthetic construct
  source 1..50: mol_type = other DNA
ctaaaattaatcaccaaaaaataacaaccaaaacacaccacattccccca

SEQ ID NO: 52554 - DNA, 50 bp, synthetic construct
  source 1..50: mol_type = other DNA
ctaaaattaatcaccaaaaaataacaaccgaaacacaccgcgttcccccg

SEQ ID NO: 52555 - DNA, 50 bp, synthetic construct
  source 1..50: mol_type = other DNA
cacatccactaaaattaatcaccaaaaaataacaaccaaaacacaccaca

SEQ ID NO: 52556 - DNA, 50 bp, synthetic construct
  source 1..50: mol_type = other DNA
cacgtccactaaaattaatcaccaaaaaataacaaccgaaacacaccgcg

SEQ ID NO: 52557 - DNA, 50 bp, synthetic construct
  source 1..50: mol_type = other DNA
ttcaaaaattctacaccacttacattctacaaaactaaactatatccaca

SEQ ID NO: 52558 - DNA, 50 bp, synthetic construct
  source 1..50: mol_type = other DNA
ttcaaaaattctacgccgcttacattctacgaaactaaactatatccgcg

SEQ ID NO: 52559 - DNA, 50 bp, synthetic construct
  source 1..50: mol_type = other DNA
aatttcactcaaaaactctttcaaaaattctacaccacttacattctaca

SEQ ID NO: 52560 - DNA, 50 bp, synthetic construct
  source 1..50: mol_type = other DNA
aatttcactcgaaaactctttcaaaaattctacgccgcttacattctacg

SEQ ID NO: 52561 - DNA, 50 bp, synthetic construct
  source 1..50: mol_type = other DNA
acaaacaaacataaatttcactcaaaaactctttcaaaaattctacacca

SEQ ID NO: 52562 - DNA, 50 bp, synthetic construct
  source 1..50: mol_type = other DNA
acgaacgaacgtaaatttcactcgaaaactctttcaaaaattctacgccg

SEQ ID NO: 52563 - DNA, 50 bp, synthetic construct
  source 1..50: mol_type = other DNA
atccaaccccacaaaatacaaacaacacaaaatccttaaaaaaacttcca

SEQ ID NO: 52564 - DNA, 50 bp, synthetic construct
  source 1..50: mol_type = other DNA
atccaaccccgcaaaatacaaacgacgcaaaatccttaaaaaaacttccg

SEQ ID NO: 52565 - DNA, 50 bp, synthetic construct
  source 1..50: mol_type = other DNA
ataaaaacaataaacaatactacccataactccataaaaaaataaaacca

SEQ ID NO: 52566 - DNA, 50 bp, synthetic construct
  source 1..50: mol_type = other DNA
ataaaaacgataaacgatactacccgtaactccgtaaaaaaataaaaccg

SEQ ID NO: 52567 - DNA, 50 bp, synthetic construct
  source 1..50: mol_type = other DNA
ccaaaacacataaaatataaaaacaataaacaatactacccataactcca

SEQ ID NO: 52568 - DNA, 50 bp, synthetic construct
  source 1..50: mol_type = other DNA
ccaaaacgcgtaaaatataaaaacgataaacgatactacccgtaactccg

SEQ ID NO: 52569 - DNA, 50 bp, synthetic construct
  source 1..50: mol_type = other DNA
attctaaaccaaaacacataaaatataaaaacaataaacaatactaccca

SEQ ID NO: 52570 - DNA, 50 bp, synthetic construct
  source 1..50: mol_type = other DNA
attctaaaccaaaacgcgtaaaatataaaaacgataaacgatactacccg

SEQ ID NO: 52571 - DNA, 50 bp, synthetic construct
  source 1..50: mol_type = other DNA
cctaacaccaattctaaaccaaaacacataaaatataaaaacaataaaca

SEQ ID NO: 52572 - DNA, 50 bp, synthetic construct
  source 1..50: mol_type = other DNA
cctaacgccgattctaaaccaaaacgcgtaaaatataaaaacgataaacg

SEQ ID NO: 52573 - DNA, 50 bp, synthetic construct
  source 1..50: mol_type = other DNA
aacacacctattactccaaacctttccctaaaactatccttctttactca

SEQ ID NO: 52574 - DNA, 50 bp, synthetic construct
  source 1..50: mol_type = other DNA
aacgcacctattactccaaacctttccctaaaactatccttctttactcg

SEQ ID NO: 52575 - DNA, 50 bp, synthetic construct
  source 1..50: mol_type = other DNA
aatatcaaatacaaattctaaatactaaaaacatacaaatttcaatacca

SEQ ID NO: 52576 - DNA, 50 bp, synthetic construct
  source 1..50: mol_type = other DNA
aatatcaaatacaaattctaaatactaaaaacatacgaatttcgataccg

SEQ ID NO: 52577 - DNA, 50 bp, synthetic construct
  source 1..50: mol_type = other DNA
ttagtaaatttagataaaataagtaaaatgggttaggtgtggtggtttat

SEQ ID NO: 52578 - DNA, 50 bp, synthetic construct
  source 1..50: mol_type = other DNA
ttagtaaatttagataaaataagtaaaatgggttaggcgcggtggtttac

SEQ ID NO: 52579 - DNA, 50 bp, synthetic construct
  source 1..50: mol_type = other DNA
caaacttcacaaataacacaaacaaaacacaaaacccaccaaatttatca

SEQ ID NO: 52580 - DNA, 50 bp, synthetic construct
  source 1..50: mol_type = other DNA
cgaacttcacaaataacacgaacgaaacacaaaacccaccaaatttatcg

SEQ ID NO: 52581 - DNA, 50 bp, synthetic construct
  source 1..50: mol_type = other DNA
aacaacaaataaaacttctttcaacaaaacaaatttcaataaaaaataca

SEQ ID NO: 52582 - DNA, 50 bp, synthetic construct
  source 1..50: mol_type = other DNA
aacgacgaataaaacttctttcaacaaaacgaatttcaataaaaaatacg

SEQ ID NO: 52583 - DNA, 50 bp, synthetic construct
  source 1..50: mol_type = other DNA
aacaaaacaaaaacaaacaaatcttactaaaaactacttcccccatccca

SEQ ID NO: 52584 - DNA, 50 bp, synthetic construct
  source 1..50: mol_type = other DNA
aacaaaacaaaaacgaacgaatcttactaaaaactacttcccccgtcccg

SEQ ID NO: 52585 - DNA, 50 bp, synthetic construct
  source 1..50: mol_type = other DNA
aacaacaacttctaatcccactaaaacacaaaaacaaccacaataaccca

SEQ ID NO: 52586 - DNA, 50 bp, synthetic construct
  source 1..50: mol_type = other DNA
aacgacaacttctaatcccgctaaaacacaaaaacaaccacaataacccg

SEQ ID NO: 52587 - DNA, 50 bp, synthetic construct
  source 1..50: mol_type = other DNA
cctaaacacactaccttacaaatcactataactactcctatacttcaaca

SEQ ID NO: 52588 - DNA, 50 bp, synthetic construct
  source 1..50: mol_type = other DNA
cctaaacgcactaccttacgaatcactataactactcctatacttcaacg

SEQ ID NO: 52589 - DNA, 50 bp, synthetic construct
  source 1..50: mol_type = other DNA
tcactataactactcctatacttcaacaaaactaaaaactaccacccaca

SEQ ID NO: 52590 - DNA, 50 bp, synthetic construct
  source 1..50: mol_type = other DNA
tcactataactactcctatacttcaacgaaactaaaaactaccgcccacg

SEQ ID NO: 52591 - DNA, 50 bp, synthetic construct
  source 1..50: mol_type = other DNA
aatactcaccctaaaaaaacacaacctaatacaatccaatacaaaactca

SEQ ID NO: 52592 - DNA, 50 bp, synthetic construct
  source 1..50: mol_type = other DNA
aatactcaccctaaaaaaacgcgacctaatacaatccaatacaaaactcg

SEQ ID NO: 52593 - DNA, 50 bp, synthetic construct
  source 1..50: mol_type = other DNA
tactacaaatacatctacacataaaactaacaacaaaacacctcacaaca

SEQ ID NO: 52594 - DNA, 50 bp, synthetic construct
  source 1..50: mol_type = other DNA
tactacaaatacgtctacacgtaaaactaacaacaaaacgcctcgcaacg

SEQ ID NO: 52595 - DNA, 50 bp, synthetic construct
  source 1..50: mol_type = other DNA
accacacaaattcctaaaaaactaaatcaccattcccaataaaactaaca

SEQ ID NO: 52596 - DNA, 50 bp, synthetic construct
  source 1..50: mol_type = other DNA
gccacgcaaattcctaaaaaactaaatcaccattcccgataaaactaacg

SEQ ID NO: 52597 - DNA, 50 bp, synthetic construct
  source 1..50: mol_type = other DNA
ccattcccaataaaactaacaaacattaaatttcaaataccctcatacca

SEQ ID NO: 52598 - DNA, 50 bp, synthetic construct
  source 1..50: mol_type = other DNA
ccattcccgataaaactaacgaacattaaatttcaaataccctcgtaccg

SEQ ID NO: 52599 - DNA, 50 bp, synthetic construct
  source 1..50: mol_type = other DNA
aaaaaacatcaaaacaccccacaaccacaataaataactcacaataaaca

SEQ ID NO: 52600 - DNA, 50 bp, synthetic construct
  source 1..50: mol_type = other DNA
aaaaaacatcaaaacaccccgcaaccacgataaataactcacgataaacg

SEQ ID NO: 52601 - DNA, 50 bp, synthetic construct
  source 1..50: mol_type = other DNA
ttcaaacaattctcctatctcaacctcatacataactaaaattacaaaca

SEQ ID NO: 52602 - DNA, 50 bp, synthetic construct
  source 1..50: mol_type = other DNA
ttcaaacgattctcctatctcaacctcatacgtaactaaaattacaaacg

SEQ ID NO: 52603 - DNA, 50 bp, synthetic construct
  source 1..50: mol_type = other DNA
tcaaatacatcataaacacctctaaacaaaatcaactaaattcacacaca

SEQ ID NO: 52604 - DNA, 50 bp, synthetic construct
  source 1..50: mol_type = other DNA
tcgaatacgtcataaacacctctaaacaaaatcgactaaattcgcacacg

SEQ ID NO: 52605 - DNA, 50 bp, synthetic construct
  source 1..50: mol_type = other DNA
ccaaattccatcacattcaaatacatcataaacacctctaaacaaaatca

SEQ ID NO: 52606 - DNA, 50 bp, synthetic construct
  source 1..50: mol_type = other DNA
ccgaattccgtcacattcgaatacgtcataaacacctctaaacaaaatcg

SEQ ID NO: 52607 - DNA, 50 bp, synthetic construct
  source 1..50: mol_type = other DNA
aactcaatcaaccctacccaaaaatatccataacatacccaaatataaca

SEQ ID NO: 52608 - DNA, 50 bp, synthetic construct
  source 1..50: mol_type = other DNA
aactcaatcgaccctacccaaaaatatccataacgtacccgaatataacg

SEQ ID NO: 52609 - DNA, 50 bp, synthetic construct
  source 1..50: mol_type = other DNA
aaaataaaataaacctcacacacaaaataaaaaacaaaaccaattacaca

SEQ ID NO: 52610 - DNA, 50 bp, synthetic construct
  source 1..50: mol_type = other DNA
aaaataaaataaacctcacacacgaaataaaaaacaaaaccgattacgcg

SEQ ID NO: 52611 - DNA, 50 bp, synthetic construct
  source 1..50: mol_type = other DNA
taaaataaacctcacacacaaaataaaaaacaaaaccaattacacacaca

SEQ ID NO: 52612 - DNA, 50 bp, synthetic construct
  source 1..50: mol_type = other DNA
taaaataaacctcacacacgaaataaaaaacaaaaccgattacgcgcacg

SEQ ID NO: 52613 - DNA, 50 bp, synthetic construct
  source 1..50: mol_type = other DNA
aaaatattaacaataacaatcaaaaaatacaacaaaactaaaacccaaca

SEQ ID NO: 52614 - DNA, 50 bp, synthetic construct
  source 1..50: mol_type = other DNA
aaaatattaacaataacaatcgaaaaatacgacaaaactaaaacccgacg

SEQ ID NO: 52615 - DNA, 50 bp, synthetic construct
  source 1..50: mol_type = other DNA
aaaaaactaaaatctccccaaaaactctacaataaaaaaataattaaaca

SEQ ID NO: 52616 - DNA, 50 bp, synthetic construct
  source 1..50: mol_type = other DNA
aaaaaactaaaatctccccaaaaactctacgataaaaaaataattaaacg

SEQ ID NO: 52617 - DNA, 50 bp, synthetic construct
  source 1..50: mol_type = other DNA
caaacccaccttaatcattataattaaaaccaaaaaaaccaaaaaaaaca

SEQ ID NO: 52618 - DNA, 50 bp, synthetic construct
  source 1..50: mol_type = other DNA
cgaacccaccttaatcgttataattaaaaccgaaaaaaccaaaaaaaacg

SEQ ID NO: 52619 - DNA, 50 bp, synthetic construct
  source 1..50: mol_type = other DNA
aaacaaaactaaatccaatatcccctaaactcccctaaataccaaaccca

SEQ ID NO: 52620 - DNA, 50 bp, synthetic construct
  source 1..50: mol_type = other DNA
aaacaaaactaaatccaatatcccctaaactcccctaaataccgaacccg

SEQ ID NO: 52621 - DNA, 50 bp, synthetic construct
  source 1..50: mol_type = other DNA
accacaaaacacataaaaactatccctaacatctaataatataaaactca

SEQ ID NO: 52622 - DNA, 50 bp, synthetic construct
  source 1..50: mol_type = other DNA
accgcgaaacacgtaaaaactatccctaacgtctaataatataaaactcg

SEQ ID NO: 52623 - DNA, 50 bp, synthetic construct
  source 1..50: mol_type = other DNA
atctaaccatataccaaaaaccacaaaacacataaaaactatccctaaca

SEQ ID NO: 52624 - DNA, 50 bp, synthetic construct
  source 1..50: mol_type = other DNA
gtctaaccgtataccaaaaaccgcgaaacacgtaaaaactatccctaacg

SEQ ID NO: 52625 - DNA, 50 bp, synthetic construct
  source 1..50: mol_type = other DNA
ctaataaaaactcaacctaacaaacatctaaccatataccaaaaaccaca

SEQ ID NO: 52626 - DNA, 50 bp, synthetic construct
  source 1..50: mol_type = other DNA
ctaataaaaactcaacctaacgaacgtctaaccgtataccaaaaaccgcg

SEQ ID NO: 52627 - DNA, 50 bp, synthetic construct
  source 1..50: mol_type = other DNA
actcaccaaataaaacctaataaaaactcaacctaacaaacatctaacca

SEQ ID NO: 52628 - DNA, 50 bp, synthetic construct
  source 1..50: mol_type = other DNA
actcgccaaataaaacctaataaaaactcaacctaacgaacgtctaaccg

SEQ ID NO: 52629 - DNA, 50 bp, synthetic construct
  source 1..50: mol_type = other DNA
ccaaccaaaccctaaaataaaaaaatctccaaaacttccaataattacca

SEQ ID NO: 52630 - DNA, 50 bp, synthetic construct
  source 1..50: mol_type = other DNA
ccgaccaaaccctaaaataaaaaaatctccgaaacttccaataattaccg

SEQ ID NO: 52631 - DNA, 50 bp, synthetic construct
  source 1..50: mol_type = other DNA
taaaataaaaaaatctccaaaacttccaataattaccatccaaccacaca

SEQ ID NO: 52632 - DNA, 50 bp, synthetic construct
  source 1..50: mol_type = other DNA
taaaataaaaaaatctccgaaacttccaataattaccgtccaaccacacg

SEQ ID NO: 52633 - DNA, 50 bp, synthetic construct
  source 1..50: mol_type = other DNA
tctacccaacactccaaaaacaataaccaaacaacaaaaactaaaaatca

SEQ ID NO: 52634 - DNA, 50 bp, synthetic construct
  source 1..50: mol_type = other DNA
tctacccgacgctccaaaaacaataaccgaacaacaaaaactaaaaatcg

SEQ ID NO: 52635 - DNA, 50 bp, synthetic construct
  source 1..50: mol_type = other DNA
ctatcccttcccctaaaaaaccattctaacaaaaatatcacaaatcccca

SEQ ID NO: 52636 - DNA, 50 bp, synthetic construct
  source 1..50: mol_type = other DNA
ctatcccttcccctaaaaaaccgttctaacaaaaatatcgcaaatccccg

SEQ ID NO: 52637 - DNA, 50 bp, synthetic construct
  source 1..50: mol_type = other DNA
cccaacaaacctatcccttcccctaaaaaaccattctaacaaaaatatca

SEQ ID NO: 52638 - DNA, 50 bp, synthetic construct
  source 1..50: mol_type = other DNA
cccaacgaacctatcccttcccctaaaaaaccgttctaacaaaaatatcg

SEQ ID NO: 52639 - DNA, 50 bp, synthetic construct
  source 1..50: mol_type = other DNA
taactaaaaaacccctccaacaacaaaaaccctaaactcacctatatcca

SEQ ID NO: 52640 - DNA, 50 bp, synthetic construct
  source 1..50: mol_type = other DNA
taactaaaaaacccctccaacaacaaaaaccctaaactcgcctatatccg

SEQ ID NO: 52641 - DNA, 50 bp, synthetic construct
  source 1..50: mol_type = other DNA
aatcccctaaacctcctaaaattaccacctaaaaaaaacatccacaaaca

SEQ ID NO: 52642 - DNA, 50 bp, synthetic construct
  source 1..50: mol_type = other DNA
gatcccctaaacctcctaaaattaccgcctaaaaaaaacgtccacaaacg

SEQ ID NO: 52643 - DNA, 50 bp, synthetic construct
  source 1..50: mol_type = other DNA
taaaaaacccaatcccctaaacctcctaaaattaccacctaaaaaaaaca

SEQ ID NO: 52644 - DNA, 50 bp, synthetic construct
  source 1..50: mol_type = other DNA
taaaaaacccgatcccctaaacctcctaaaattaccgcctaaaaaaaacg

SEQ ID NO: 52645 - DNA, 50 bp, synthetic construct
  source 1..50: mol_type = other DNA
aaactcctaacaacaaaatcaaatatcaaacaaaaccacactcaactcca

SEQ ID NO: 52646 - DNA, 50 bp, synthetic construct
  source 1..50: mol_type = other DNA
aaactcctaacgacgaaatcaaatatcaaacaaaaccacgctcaactccg

SEQ ID NO: 52647 - DNA, 50 bp, synthetic construct
  source 1..50: mol_type = other DNA
catcccaaaccaaccccaaaaataaaaaccacaaaaccaaaaaaacatca

SEQ ID NO: 52648 - DNA, 50 bp, synthetic construct
  source 1..50: mol_type = other DNA
catcccaaaccaaccccgaaaataaaaaccacaaaaccaaaaaaacgtcg

SEQ ID NO: 52649 - DNA, 50 bp, synthetic construct
  source 1..50: mol_type = other DNA
cctacaatacacaacaccaaaccataaaatctcaacctacaatcaaacca

SEQ ID NO: 52650 - DNA, 50 bp, synthetic construct
  source 1..50: mol_type = other DNA
cctacaatacacaacgccaaaccataaaatctcaacctacgatcaaaccg

SEQ ID NO: 52651 - DNA, 50 bp, synthetic construct
  source 1..50: mol_type = other DNA
acaaaaacccaaccccaaaaactaccaaataaatctcactcaactaaaca

SEQ ID NO: 52652 - DNA, 50 bp, synthetic construct
  source 1..50: mol_type = other DNA
acaaaaacccaaccccgaaaactaccgaataaatctcactcaactaaacg

SEQ ID NO: 52653 - DNA, 50 bp, synthetic construct
  source 1..50: mol_type = other DNA
cctaacttccaatacccaaaaaccaaataaaataaatcacaaaacccaca

SEQ ID NO: 52654 - DNA, 50 bp, synthetic construct
  source 1..50: mol_type = other DNA
cctaacttccgatacccaaaaaccgaataaaataaatcgcgaaacccacg

SEQ ID NO: 52655 - DNA, 50 bp, synthetic construct
  source 1..50: mol_type = other DNA
atatcaaataaactaaaaaaaactacctctaaaatctactacactcacca

SEQ ID NO: 52656 - DNA, 50 bp, synthetic construct
  source 1..50: mol_type = other DNA
atatcaaataaactaaaaaaaactacctctaaaatctactacgctcgccg

SEQ ID NO: 52657 - DNA, 50 bp, synthetic construct
  source 1..50: mol_type = other DNA
aaaacaaccaaaaaaaatcacaaaaaaaatccctacccaccataacccca

SEQ ID NO: 52658 - DNA, 50 bp, synthetic construct
  source 1..50: mol_type = other DNA
aaaacaaccaaaaaaaatcacgaaaaaaatccctacccgccataaccccg

SEQ ID NO: 52659 - DNA, 50 bp, synthetic construct
  source 1..50: mol_type = other DNA
cttactaaaaaaaaacaaccaaaaaaaatcacaaaaaaaatccctaccca

SEQ ID NO: 52660 - DNA, 50 bp, synthetic construct
  source 1..50: mol_type = other DNA
cttactaaaaaaaaacaaccaaaaaaaatcacgaaaaaaatccctacccg

SEQ ID NO: 52661 - DNA, 50 bp, synthetic construct
  source 1..50: mol_type = other DNA
tacattttaaaaataatatacaccaaattccaaaaaacaactcactcaca

SEQ ID NO: 52662 - DNA, 50 bp, synthetic construct
  source 1..50: mol_type = other DNA
tacgttttaaaaataatatacgccaaattccgaaaaacgactcactcgcg

SEQ ID NO: 52663 - DNA, 50 bp, synthetic construct
  source 1..50: mol_type = other DNA
actacattttaaaaataatatacaccaaattccaaaaaacaactcactca

SEQ ID NO: 52664 - DNA, 50 bp, synthetic construct
  source 1..50: mol_type = other DNA
gctacgttttaaaaataatatacgccaaattccgaaaaacgactcactcg

SEQ ID NO: 52665 - DNA, 50 bp, synthetic construct
  source 1..50: mol_type = other DNA
ccaaaccccactacattttaaaaataatatacaccaaattccaaaaaaca

SEQ ID NO: 52666 - DNA, 50 bp, synthetic construct
  source 1..50: mol_type = other DNA
ccaaaccccgctacgttttaaaaataatatacgccaaattccgaaaaacg

SEQ ID NO: 52667 - DNA, 50 bp, synthetic construct
  source 1..50: mol_type = other DNA
cttaattccaaaccccactacattttaaaaataatatacaccaaattcca

SEQ ID NO: 52668 - DNA, 50 bp, synthetic construct
  source 1..50: mol_type = other DNA
cttaattccaaaccccgctacgttttaaaaataatatacgccaaattccg

SEQ ID NO: 52669 - DNA, 50 bp, synthetic construct
  source 1..50: mol_type = other DNA
aaataaaaccaaaaaaaacaaccttaaccttaattccaaaccccactaca

SEQ ID NO: 52670 - DNA, 50 bp, synthetic construct
  source 1..50: mol_type = other DNA
aaataaaaccgaaaaaaacgaccttaaccttaattccaaaccccgctacg

SEQ ID NO: 52671 - DNA, 50 bp, synthetic construct
  source 1..50: mol_type = other DNA
caaactaacaaacctaataccactatctcaataacctactttataactca

SEQ ID NO: 52672 - DNA, 50 bp, synthetic construct
  source 1..50: mol_type = other DNA
cgaactaacgaacctaataccgctatctcaataacctactttataactcg

SEQ ID NO: 52673 - DNA, 50 bp, synthetic construct
  source 1..50: mol_type = other DNA
aaaacccaaaaaatcattaccaaatcatctcccctacaaacactatccca

SEQ ID NO: 52674 - DNA, 50 bp, synthetic construct
  source 1..50: mol_type = other DNA
aaaacccaaaaaatcattaccgaatcatctcccctacaaacactatcccg

SEQ ID NO: 52675 - DNA, 50 bp, synthetic construct
  source 1..50: mol_type = other DNA
ctacactacacaaaactacccaaaacaatacctacaaaaaaaataactca

SEQ ID NO: 52676 - DNA, 50 bp, synthetic construct
  source 1..50: mol_type = other DNA
ctacactacacgaaactacccgaaacaatacctacaaaaaaaataactcg

SEQ ID NO: 52677 - DNA, 50 bp, synthetic construct
  source 1..50: mol_type = other DNA
aaaaacccaaaaaaatccacaaaaaaaccaaaacacaaaacacaaataca

SEQ ID NO: 52678 - DNA, 50 bp, synthetic construct
  source 1..50: mol_type = other DNA
aaaaacccaaaaaaatccgcaaaaaaaccaaaacacaaaacacgaatacg

SEQ ID NO: 52679 - DNA, 50 bp, synthetic construct
  source 1..50: mol_type = other DNA
atccttcaaaatccccaattatcaccacaaaattaaacacaatatcccca

SEQ ID NO: 52680 - DNA, 50 bp, synthetic construct
  source 1..50: mol_type = other DNA
atccttcgaaatccccaattatcaccacaaaattaaacacgatatccccg

SEQ ID NO: 52681 - DNA, 50 bp, synthetic construct
  source 1..50: mol_type = other DNA
attcatataacatatacaaaacaaaacaatccacaaataaaaaataaaca

SEQ ID NO: 52682 - DNA, 50 bp, synthetic construct
  source 1..50: mol_type = other DNA
gttcatataacgtatacaaaacaaaacaatccacaaataaaaaataaacg

SEQ ID NO: 52683 - DNA, 50 bp, synthetic construct
  source 1..50: mol_type = other DNA
cccatctataaactaccctactctacacacatcacataaacaaaatcaca

SEQ ID NO: 52684 - DNA, 50 bp, synthetic construct
  source 1..50: mol_type = other DNA
cccatctataaactaccctactctacacacgtcacataaacgaaatcacg

SEQ ID NO: 52685 - DNA, 50 bp, synthetic construct
  source 1..50: mol_type = other DNA
ctataaactaccctactctacacacatcacataaacaaaatcacatacca

SEQ ID NO: 52686 - DNA, 50 bp, synthetic construct
  source 1..50: mol_type = other DNA
ctataaactaccctactctacacacgtcacataaacgaaatcacgtaccg

SEQ ID NO: 52687 - DNA, 50 bp, synthetic construct
  source 1..50: mol_type = other DNA
acccaacataaatactctacaaaaacatacttacaaaaaaacaccaaaca

SEQ ID NO: 52688 - DNA, 50 bp, synthetic construct
  source 1..50: mol_type = other DNA
gcccgacataaatactctacgaaaacgtacttacgaaaaaacgccaaacg

SEQ ID NO: 52689 - DNA, 50 bp, synthetic construct
  source 1..50: mol_type = other DNA
tctatacacccaacataaatactctacaaaaacatacttacaaaaaaaca

SEQ ID NO: 52690 - DNA, 50 bp, synthetic construct
  source 1..50: mol_type = other DNA
tctatacgcccgacataaatactctacgaaaacgtacttacgaaaaaacg

SEQ ID NO: 52691 - DNA, 50 bp, synthetic construct
  source 1..50: mol_type = other DNA
atctatcatctatacacccaacataaatactctacaaaaacatacttaca

SEQ ID NO: 52692 - DNA, 50 bp, synthetic construct
  source 1..50: mol_type = other DNA
atctatcgtctatacgcccgacataaatactctacgaaaacgtacttacg

SEQ ID NO: 52693 - DNA, 50 bp, synthetic construct
  source 1..50: mol_type = other DNA
aaaattaaatctatcatctatacacccaacataaatactctacaaaaaca

SEQ ID NO: 52694 - DNA, 50 bp, synthetic construct
  source 1..50: mol_type = other DNA
aaaattaaatctatcgtctatacgcccgacataaatactctacgaaaacg

SEQ ID NO: 52695 - DNA, 50 bp, synthetic construct
  source 1..50: mol_type = other DNA
aaaacaaaaattaaatctatcatctatacacccaacataaatactctaca

SEQ ID NO: 52696 - DNA, 50 bp, synthetic construct
  source 1..50: mol_type = other DNA
aaaacgaaaattaaatctatcgtctatacgcccgacataaatactctacg

SEQ ID NO: 52697 - DNA, 50 bp, synthetic construct
  source 1..50: mol_type = other DNA
tcctaaaccccataaaaaaacaaaaattaaatctatcatctatacaccca

SEQ ID NO: 52698 - DNA, 50 bp, synthetic construct
  source 1..50: mol_type = other DNA
tcctaaaccccgtaaaaaaacgaaaattaaatctatcgtctatacgcccg

SEQ ID NO: 52699 - DNA, 50 bp, synthetic construct
  source 1..50: mol_type = other DNA
aacctcctaaaccccataaaaaaacaaaaattaaatctatcatctataca

SEQ ID NO: 52700 - DNA, 50 bp, synthetic construct
  source 1..50: mol_type = other DNA
aacctcctaaaccccgtaaaaaaacgaaaattaaatctatcgtctatacg

SEQ ID NO: 52701 - DNA, 50 bp, synthetic construct
  source 1..50: mol_type = other DNA
tcaccctaaacctcctaaaccccataaaaaaacaaaaattaaatctatca

SEQ ID NO: 52702 - DNA, 50 bp, synthetic construct
  source 1..50: mol_type = other DNA
tcgccctaaacctcctaaaccccgtaaaaaaacgaaaattaaatctatcg

SEQ ID NO: 52703 - DNA, 50 bp, synthetic construct
  source 1..50: mol_type = other DNA
accctacaaacaaaaacaaacctaaaattctaaccaaaacaaaaatttca

SEQ ID NO: 52704 - DNA, 50 bp, synthetic construct
  source 1..50: mol_type = other DNA
accctacgaacgaaaacaaacctaaaattctaaccaaaacgaaaatttcg

SEQ ID NO: 52705 - DNA, 50 bp, synthetic construct
  source 1..50: mol_type = other DNA
taccaaccccataatcaccttacctccctactaaaaaatataatcaccca

SEQ ID NO: 52706 - DNA, 50 bp, synthetic construct
  source 1..50: mol_type = other DNA
taccaaccccgtaatcaccttacctccctactaaaaaatataatcacccg

SEQ ID NO: 52707 - DNA, 50 bp, synthetic construct
  source 1..50: mol_type = other DNA
aaaaaacaaaataaccacaaaactaacaatctactcttcatcccaaccca

SEQ ID NO: 52708 - DNA, 50 bp, synthetic construct
  source 1..50: mol_type = other DNA
aaaaaacaaaataaccacgaaactaacaatctactcttcgtcccaacccg

SEQ ID NO: 52709 - DNA, 50 bp, synthetic construct
  source 1..50: mol_type = other DNA
aaatacaaaaacaaaaaacaaaactaaaaatccacccacactaccaaaca

SEQ ID NO: 52710 - DNA, 50 bp, synthetic construct
  source 1..50: mol_type = other DNA
aaatacaaaaacgaaaaacaaaactaaaaatccacccacactaccgaacg

SEQ ID NO: 52711 - DNA, 50 bp, synthetic construct
  source 1..50: mol_type = other DNA
caaacacaaatacacaaacacacacacaatatacacccataaaacacaca

SEQ ID NO: 52712 - DNA, 50 bp, synthetic construct
  source 1..50: mol_type = other DNA
caaacacgaatacacaaacacgcacacaatatacacccataaaacacacg

SEQ ID NO: 52713 - DNA, 50 bp, synthetic construct
  source 1..50: mol_type = other DNA
aaacacacacacaatatacacccataaaacacacacatataaaacacaca

SEQ ID NO: 52714 - DNA, 50 bp, synthetic construct
  source 1..50: mol_type = other DNA
aaacacgcacacaatatacacccataaaacacacgcgtataaaacacacg

SEQ ID NO: 52715 - DNA, 50 bp, synthetic construct
  source 1..50: mol_type = other DNA
aacataaatacaataatacaatttcaactcactacaacctcaacttccca

SEQ ID NO: 52716 - DNA, 50 bp, synthetic construct
  source 1..50: mol_type = other DNA
aacataaatacaataatacgatttcgactcactacaacctcaacttcccg

SEQ ID NO: 52717 - DNA, 50 bp, synthetic construct
  source 1..50: mol_type = other DNA
aatttcaactcactacaacctcaacttcccaaattcaaataattctatca

SEQ ID NO: 52718 - DNA, 50 bp, synthetic construct
  source 1..50: mol_type = other DNA
gatttcgactcactacaacctcaacttcccgaattcaaataattctatcg

SEQ ID NO: 52719 - DNA, 50 bp, synthetic construct
  source 1..50: mol_type = other DNA
accctatctatactaaaaatacaaaatttaaccaaacacaataacaaaca

SEQ ID NO: 52720 - DNA, 50 bp, synthetic construct
  source 1..50: mol_type = other DNA
accctatctatactaaaaatacaaaatttaaccgaacgcgataacaaacg

SEQ ID NO: 52721 - DNA, 50 bp, synthetic construct
  source 1..50: mol_type = other DNA
ccacacccaaccaattttttatatttttcaataaaaacaaaatttcacca

SEQ ID NO: 52722 - DNA, 50 bp, synthetic construct
  source 1..50: mol_type = other DNA
ccacgcccgaccaattttttatatttttcaataaaaacgaaatttcaccg

SEQ ID NO: 52723 - DNA, 50 bp, synthetic construct
  source 1..50: mol_type = other DNA
atatctcacaacaaatatctaaaaccttccaaacaaacctcaaacatcca

SEQ ID NO: 52724 - DNA, 50 bp, synthetic construct
  source 1..50: mol_type = other DNA
atatctcgcaacgaatatctaaaaccttccaaacaaacctcaaacgtccg

SEQ ID NO: 52725 - DNA, 50 bp, synthetic construct
  source 1..50: mol_type = other DNA
aacaaactaaaaaacacaccaaacaacaaacaaaaacctaaaaaaaacca

SEQ ID NO: 52726 - DNA, 50 bp, synthetic construct
  source 1..50: mol_type = other DNA
aacaaactaaaaaacgcaccgaacgacgaacgaaaacctaaaaaaaaccg

SEQ ID NO: 52727 - DNA, 50 bp, synthetic construct
  source 1..50: mol_type = other DNA
aatctaactcacctacctaaaactataccaattcccaacccaaactaaca

SEQ ID NO: 52728 - DNA, 50 bp, synthetic construct
  source 1..50: mol_type = other DNA
aatctaactcacctacctaaaactataccgattcccaacccaaactaacg

SEQ ID NO: 52729 - DNA, 50 bp, synthetic construct
  source 1..50: mol_type = other DNA
ccacaaaaaataacacatactataacaattacataataattcatactcca

SEQ ID NO: 52730 - DNA, 50 bp, synthetic construct
  source 1..50: mol_type = other DNA
ccacgaaaaataacacatactataacgattacgtaataattcgtactccg

SEQ ID NO: 52731 - DNA, 50 bp, synthetic construct
  source 1..50: mol_type = other DNA
aaaaattccaaacaaaaatacaaaaacccctcaaaatctaacccacacca

SEQ ID NO: 52732 - DNA, 50 bp, synthetic construct
  source 1..50: mol_type = other DNA
aaaaattccaaacgaaaatacgaaaacccctcgaaatctaacccacaccg

SEQ ID NO: 52733 - DNA, 50 bp, synthetic construct
  source 1..50: mol_type = other DNA
cactttcaaacctttaaactattccaccacaataaactacaaataaaaca

SEQ ID NO: 52734 - DNA, 50 bp, synthetic construct
  source 1..50: mol_type = other DNA
cactttcgaacctttaaactattccgccgcaataaactacaaataaaacg

SEQ ID NO: 52735 - DNA, 50 bp, synthetic construct
  source 1..50: mol_type = other DNA
ccaataactcataattataatcccaatactttaaaaaaccaaaacaaaca

SEQ ID NO: 52736 - DNA, 50 bp, synthetic construct
  source 1..50: mol_type = other DNA
ccaataactcataattataatcccgatactttaaaaaaccaaaacaaacg

SEQ ID NO: 52737 - DNA, 50 bp, synthetic construct
  source 1..50: mol_type = other DNA
aaacataacccaaacaatactaaaaacaaaaccaaaacctttaaaaccca

SEQ ID NO: 52738 - DNA, 50 bp, synthetic construct
  source 1..50: mol_type = other DNA
aaacgtaacccgaacgatactaaaaacgaaaccgaaacctttaaaacccg

SEQ ID NO: 52739 - DNA, 50 bp, synthetic construct
  source 1..50: mol_type = other DNA
taaaaccaaccataacacccaaactcaattttctcaaaacctaatttaca

SEQ ID NO: 52740 - DNA, 50 bp, synthetic construct
  source 1..50: mol_type = other DNA
taaaaccgaccgtaacacccgaactcaattttctcgaaacctaatttacg

SEQ ID NO: 52741 - DNA, 50 bp, synthetic construct
  source 1..50: mol_type = other DNA
aaacacaaaacaataaaaacctaaaacctaaaacctaaaacaaaataaca

SEQ ID NO: 52742 - DNA, 50 bp, synthetic construct
  source 1..50: mol_type = other DNA
aaacgcaaaacgataaaaacctaaaacctaaaacctaaaacgaaataacg

SEQ ID NO: 52743 - DNA, 50 bp, synthetic construct
  source 1..50: mol_type = other DNA
aattactccaatcaaaaaccctaccccaaatacctcaaacacaataccca

SEQ ID NO: 52744 - DNA, 50 bp, synthetic construct
  source 1..50: mol_type = other DNA
aattactccaatcaaaaaccctaccccaaatacctcgaacacaatacccg

SEQ ID NO: 52745 - DNA, 50 bp, synthetic construct
  source 1..50: mol_type = other DNA
aattatttttatataaacacaatctcaacttattatccaaattaatctca

SEQ ID NO: 52746 - DNA, 50 bp, synthetic construct
  source 1..50: mol_type = other DNA
aattatttttatataaacgcgatctcgacttattatccaaattaatctcg

SEQ ID NO: 52747 - DNA, 50 bp, synthetic construct
  source 1..50: mol_type = other DNA
caaaaacatacaaacaacaatccaaaaaccaaaatataacaatacacaca

SEQ ID NO: 52748 - DNA, 50 bp, synthetic construct
  source 1..50: mol_type = other DNA
caaaaacgtacgaacaacgatccaaaaaccgaaatataacaatacgcacg

SEQ ID NO: 52749 - DNA, 50 bp, synthetic construct
  source 1..50: mol_type = other DNA
ataacaaaaacatacaaacaacaatccaaaaaccaaaatataacaataca

SEQ ID NO: 52750 - DNA, 50 bp, synthetic construct
  source 1..50: mol_type = other DNA
ataacaaaaacgtacgaacaacgatccaaaaaccgaaatataacaatacg

SEQ ID NO: 52751 - DNA, 50 bp, synthetic construct
  source 1..50: mol_type = other DNA
aacaatcaaacaaatataacaaaaacatacaaacaacaatccaaaaacca

SEQ ID NO: 52752 - DNA, 50 bp, synthetic construct
  source 1..50: mol_type = other DNA
aacaatcaaacgaatataacaaaaacgtacgaacaacgatccaaaaaccg

SEQ ID NO: 52753 - DNA, 50 bp, synthetic construct
  source 1..50: mol_type = other DNA
tccaaacccctaaaaactaaaaaccttaaccaaaaaaaataaatccaaca

SEQ ID NO: 52754 - DNA, 50 bp, synthetic construct
  source 1..50: mol_type = other DNA
tccaaacccctaaaaactaaaaaccttaaccgaaaaaaataaatccaacg

SEQ ID NO: 52755 - DNA, 50 bp, synthetic construct
  source 1..50: mol_type = other DNA
cattacaaaaacaacaataaaataaacatttaacaaaacaaacaataaca

SEQ ID NO: 52756 - DNA, 50 bp, synthetic construct
  source 1..50: mol_type = other DNA
cgttacaaaaacaacaataaaataaacatttaacaaaacaaacgataacg

SEQ ID NO: 52757 - DNA, 50 bp, synthetic construct
  source 1..50: mol_type = other DNA
aaactcaaacacaacttacacacaaaactacaataaacacataaaaatca

SEQ ID NO: 52758 - DNA, 50 bp, synthetic construct
  source 1..50: mol_type = other DNA
gaactcgaacacgacttacacgcaaaactacaataaacgcgtaaaaatcg

SEQ ID NO: 52759 - DNA, 50 bp, synthetic construct
  source 1..50: mol_type = other DNA
acaacttacacacaaaactacaataaacacataaaaatcataaaccacca

SEQ ID NO: 52760 - DNA, 50 bp, synthetic construct
  source 1..50: mol_type = other DNA
acgacttacacgcaaaactacaataaacgcgtaaaaatcgtaaaccaccg

SEQ ID NO: 52761 - DNA, 50 bp, synthetic construct
  source 1..50: mol_type = other DNA
aacaactaaacaattacactaaaatcccaaaactaacaaaaataccacca

SEQ ID NO: 52762 - DNA, 50 bp, synthetic construct
  source 1..50: mol_type = other DNA
aacgactaaacgattacgctaaaatcccaaaactaacgaaaataccgccg

SEQ ID NO: 52763 - DNA, 50 bp, synthetic construct
  source 1..50: mol_type = other DNA
aaaaacaactaaacaattacactaaaatcccaaaactaacaaaaatacca

SEQ ID NO: 52764 - DNA, 50 bp, synthetic construct
  source 1..50: mol_type = other DNA
aaaaacgactaaacgattacgctaaaatcccaaaactaacgaaaataccg

SEQ ID NO: 52765 - DNA, 50 bp, synthetic construct
  source 1..50: mol_type = other DNA
aactaaacaaaaactcataacacccaaaaaacaacatcataatctcccca

SEQ ID NO: 52766 - DNA, 50 bp, synthetic construct
  source 1..50: mol_type = other DNA
aactaaacaaaaactcataacgcccaaaaaacaacgtcgtaatctccccg

SEQ ID NO: 52767 - DNA, 50 bp, synthetic construct
  source 1..50: mol_type = other DNA
aaaccttaaacccattccacaaaacaaaacaactaaaatcacatcctcca

SEQ ID NO: 52768 - DNA, 50 bp, synthetic construct
  source 1..50: mol_type = other DNA
aaaccttaaacccattccacaaaacaaaacaactaaaatcgcgtcctccg

SEQ ID NO: 52769 - DNA, 50 bp, synthetic construct
  source 1..50: mol_type = other DNA
cacaaaacacaaacccaaccaaaaactcaatttcacataaacaaatttca

SEQ ID NO: 52770 - DNA, 50 bp, synthetic construct
  source 1..50: mol_type = other DNA
cacgaaacacgaacccaaccaaaaactcaatttcgcgtaaacgaatttcg

SEQ ID NO: 52771 - DNA, 50 bp, synthetic construct
  source 1..50: mol_type = other DNA
atcaacaacactaaattaaaaaccatccaatcaaacctacaactaaaaca

SEQ ID NO: 52772 - DNA, 50 bp, synthetic construct
  source 1..50: mol_type = other DNA
atcaacgacgctaaattaaaaaccgtccaatcaaacctacaactaaaacg

SEQ ID NO: 52773 - DNA, 50 bp, synthetic construct
  source 1..50: mol_type = other DNA
ttaaaaaccatccaatcaaacctacaactaaaacaaacaaaacaacttca

SEQ ID NO: 52774 - DNA, 50 bp, synthetic construct
  source 1..50: mol_type = other DNA
ttaaaaaccgtccaatcaaacctacaactaaaacgaacaaaacgacttcg

SEQ ID NO: 52775 - DNA, 50 bp, synthetic construct
  source 1..50: mol_type = other DNA
acttcaaaaaaacatccaaaaactactacaaccacaacataaaaaaaaca

SEQ ID NO: 52776 - DNA, 50 bp, synthetic construct
  source 1..50: mol_type = other DNA
acttcgaaaaaacgtccaaaaactactacgaccgcgacataaaaaaaacg

SEQ ID NO: 52777 - DNA, 50 bp, synthetic construct
  source 1..50: mol_type = other DNA
acctccccacctacctaataaacaaaaaaaccttaaacctaaaaaaaaca

SEQ ID NO: 52778 - DNA, 50 bp, synthetic construct
  source 1..50: mol_type = other DNA
acctccccacctacctaataaacaaaaaaaccttaaacctaaaaaaaacg

SEQ ID NO: 52779 - DNA, 50 bp, synthetic construct
  source 1..50: mol_type = other DNA
ctccccacctacctaataaacaaaaaaaccttaaacctaaaaaaaacaca

SEQ ID NO: 52780 - DNA, 50 bp, synthetic construct
  source 1..50: mol_type = other DNA
ctccccacctacctaataaacaaaaaaaccttaaacctaaaaaaaacgcg

SEQ ID NO: 52781 - DNA, 50 bp, synthetic construct
  source 1..50: mol_type = other DNA
aaaaccttaaacctaaaaaaaacacaaacaaccactactaaaaaaaaaca

SEQ ID NO: 52782 - DNA, 50 bp, synthetic construct
  source 1..50: mol_type = other DNA
aaaaccttaaacctaaaaaaaacgcgaacgaccactactaaaaaaaaacg

SEQ ID NO: 52783 - DNA, 50 bp, synthetic construct
  source 1..50: mol_type = other DNA
attcatttattaaaaataaacacataaattaccccaattttttataccca

SEQ ID NO: 52784 - DNA, 50 bp, synthetic construct
  source 1..50: mol_type = other DNA
attcatttattaaaaataaacacgtaaattaccccaattttttatacccg

SEQ ID NO: 52785 - DNA, 50 bp, synthetic construct
  source 1..50: mol_type = other DNA
cattctcaaatccaaacaaccccaataatatacaaaatcttatttttaca

SEQ ID NO: 52786 - DNA, 50 bp, synthetic construct
  source 1..50: mol_type = other DNA
cgttctcgaatccgaacaaccccgataatatacaaaatcttatttttacg

SEQ ID NO: 52787 - DNA, 50 bp, synthetic construct
  source 1..50: mol_type = other DNA
ttttaggagtgtttgtttaggagtattttttgtgattagttagttttttt

SEQ ID NO: 52788 - DNA, 50 bp, synthetic construct
  source 1..50: mol_type = other DNA
ttttaggagtgtttgtttaggagtatttttcgtgattagttagttttttc

SEQ ID NO: 52789 - DNA, 50 bp, synthetic construct
  source 1..50: mol_type = other DNA
ttgtttttgtgttggttttttgggttttatttataggtgtatttatattt

SEQ ID NO: 52790 - DNA, 50 bp, synthetic construct
  source 1..50: mol_type = other DNA
tcgttttcgtgtcggtttttcgggttttatttataggcgtatttatattc

SEQ ID NO: 52791 - DNA, 50 bp, synthetic construct
  source 1..50: mol_type = other DNA
aatacacctataaataaaacccaaaaaaccaacacaaaaacaaaaaacca

SEQ ID NO: 52792 - DNA, 50 bp, synthetic construct
  source 1..50: mol_type = other DNA
aatacgcctataaataaaacccgaaaaaccgacacgaaaacgaaaaaccg

SEQ ID NO: 52793 - DNA, 50 bp, synthetic construct
  source 1..50: mol_type = other DNA
aaaactaaacccttaaacctcacaccatcttctatctttaaaaccaccca

SEQ ID NO: 52794 - DNA, 50 bp, synthetic construct
  source 1..50: mol_type = other DNA
aaaactaaacccttaaacctcacaccatcttctatctttaaaaccacccg

SEQ ID NO: 52795 - DNA, 50 bp, synthetic construct
  source 1..50: mol_type = other DNA
ccccaaaaacaaaaaataatataaaattcaaaaactcaatcccaaactca

SEQ ID NO: 52796 - DNA, 50 bp, synthetic construct
  source 1..50: mol_type = other DNA
ccccaaaaacaaaaaataatataaaattcaaaaactcaatcccaaactcg

SEQ ID NO: 52797 - DNA, 50 bp, synthetic construct
  source 1..50: mol_type = other DNA
aagtttaggtttgtgtgagttatattttatatttatatagatatatgtat

SEQ ID NO: 52798 - DNA, 50 bp, synthetic construct
  source 1..50: mol_type = other DNA
aagtttaggtttgtgtgagttatattttatatttatatagatatacgtac

SEQ ID NO: 52799 - DNA, 50 bp, synthetic construct
  source 1..50: mol_type = other DNA
tacaaatatacctatatatctatacacatatatatacatatctataaaca

SEQ ID NO: 52800 - DNA, 50 bp, synthetic construct
  source 1..50: mol_type = other DNA
tacaaatatacctatatatctatacacatatatatacatatctataaacg

SEQ ID NO: 52801 - DNA, 50 bp, synthetic construct
  source 1..50: mol_type = other DNA
aaaaatcctaaaccaaaactacctatccctccctaaatcaacacttacca

SEQ ID NO: 52802 - DNA, 50 bp, synthetic construct
  source 1..50: mol_type = other DNA
aaaaatcctaaaccaaaactacctatccctccctaaatcaacacttaccg

SEQ ID NO: 52803 - DNA, 50 bp, synthetic construct
  source 1..50: mol_type = other DNA
ccaaaccatactctcataaatccaaccaaatcacactaaaacaatttcca

SEQ ID NO: 52804 - DNA, 50 bp, synthetic construct
  source 1..50: mol_type = other DNA
ccaaaccatactctcataaatccaaccaaatcgcgctaaaacaatttccg

SEQ ID NO: 52805 - DNA, 50 bp, synthetic construct
  source 1..50: mol_type = other DNA
aaatcaaactccataacaataaaaaaaattaaatcctaaaaccaaaaaca

SEQ ID NO: 52806 - DNA, 50 bp, synthetic construct
  source 1..50: mol_type = other DNA
aaatcgaactccataacgataaaaaaaattaaatcctaaaaccaaaaacg

SEQ ID NO: 52807 - DNA, 50 bp, synthetic construct
  source 1..50: mol_type = other DNA
cctccaaccaaccctaaactttataaaaactaaacttaaaatctccccca

SEQ ID NO: 52808 - DNA, 50 bp, synthetic construct
  source 1..50: mol_type = other DNA
cctccgaccgaccctaaactttataaaaactaaacttaaaatctcccccg

SEQ ID NO: 52809 - DNA, 50 bp, synthetic construct
  source 1..50: mol_type = other DNA
acaaaccacaaaaaaaatcccaaactcaatccccacaaaattcaaaacca

SEQ ID NO: 52810 - DNA, 50 bp, synthetic construct
  source 1..50: mol_type = other DNA
acgaaccacgaaaaaaatcccaaactcaatccccacaaaattcaaaaccg

SEQ ID NO: 52811 - DNA, 50 bp, synthetic construct
  source 1..50: mol_type = other DNA
aactcaatccccacaaaattcaaaaccaatcaaaaacaaaaacaaatcca

SEQ ID NO: 52812 - DNA, 50 bp, synthetic construct
  source 1..50: mol_type = other DNA
aactcaatccccacaaaattcaaaaccgatcgaaaacaaaaacaaatccg

SEQ ID NO: 52813 - DNA, 50 bp, synthetic construct
  source 1..50: mol_type = other DNA
atcaaaaacaaaaacaaatccaaatccaaaaataaatcacctcatcacca

SEQ ID NO: 52814 - DNA, 50 bp, synthetic construct
  source 1..50: mol_type = other DNA
atcgaaaacaaaaacaaatccgaatccaaaaataaatcgcctcatcaccg

SEQ ID NO: 52815 - DNA, 50 bp, synthetic construct
  source 1..50: mol_type = other DNA
aacaaaaacaaatccaaatccaaaaataaatcacctcatcaccaactaca

SEQ ID NO: 52816 - DNA, 50 bp, synthetic construct
  source 1..50: mol_type = other DNA
aacaaaaacaaatccgaatccaaaaataaatcgcctcatcaccgactacg

SEQ ID NO: 52817 - DNA, 50 bp, synthetic construct
  source 1..50: mol_type = other DNA
ttaaacctccaacttcaaaaaactaaataaaaaacaccacctcactacca

SEQ ID NO: 52818 - DNA, 50 bp, synthetic construct
  source 1..50: mol_type = other DNA
ttaaacctccaacttcaaaaaactaaataaaaaacgccgcctcactaccg

SEQ ID NO: 52819 - DNA, 50 bp, synthetic construct
  source 1..50: mol_type = other DNA
ataaaatctacttccatctataaaacattctccaaaaaaaacatcactca

SEQ ID NO: 52820 - DNA, 50 bp, synthetic construct
  source 1..50: mol_type = other DNA
ataaaatctacttccgtctataaaacgttctccgaaaaaaacatcgctcg

SEQ ID NO: 52821 - DNA, 50 bp, synthetic construct
  source 1..50: mol_type = other DNA
ataaaaaaaacctaccatattatcacaacaaccaaacccacaaaacaaca

SEQ ID NO: 52822 - DNA, 50 bp, synthetic construct
  source 1..50: mol_type = other DNA
ataaaaaaaacctaccgtattatcacaacgaccgaacccacaaaacgacg

SEQ ID NO: 52823 - DNA, 50 bp, synthetic construct
  source 1..50: mol_type = other DNA
acaaaattactcatcctaaactcaaataaaaaaacccaaactcaaaaaca

SEQ ID NO: 52824 - DNA, 50 bp, synthetic construct
  source 1..50: mol_type = other DNA
acgaaattactcatcctaaactcaaataaaaaaacccgaactcgaaaacg

SEQ ID NO: 52825 - DNA, 50 bp, synthetic construct
  source 1..50: mol_type = other DNA
ccatataaaaaaatacaccctaaaacaaaacctctacaaaaccacaatca

SEQ ID NO: 52826 - DNA, 50 bp, synthetic construct
  source 1..50: mol_type = other DNA
ccgtataaaaaaatacgccctaaaacaaaacctctacaaaaccacgatcg

SEQ ID NO: 52827 - DNA, 50 bp, synthetic construct
  source 1..50: mol_type = other DNA
acaatacatacaatataaaaccaacaaaaattaccatataaaaaaataca

SEQ ID NO: 52828 - DNA, 50 bp, synthetic construct
  source 1..50: mol_type = other DNA
acgatacatacaatataaaaccaacgaaaattaccgtataaaaaaatacg

SEQ ID NO: 52829 - DNA, 50 bp, synthetic construct
  source 1..50: mol_type = other DNA
taattccattaaaacactaaaaataacaatataacataaaaatcaacaca

SEQ ID NO: 52830 - DNA, 50 bp, synthetic construct
  source 1..50: mol_type = other DNA
taattccattaaaacactaaaaataacgatataacataaaaatcgacgcg

SEQ ID NO: 52831 - DNA, 50 bp, synthetic construct
  source 1..50: mol_type = other DNA
taaaaacattctaaccttaccccacccacatcaatctttatattatacca

SEQ ID NO: 52832 - DNA, 50 bp, synthetic construct
  source 1..50: mol_type = other DNA
taaaaacgttctaaccttaccccacccgcgtcgatctttatattataccg

SEQ ID NO: 52833 - DNA, 50 bp, synthetic construct
  source 1..50: mol_type = other DNA
aacatcacaataaaaacatatcctcaccccaaaaaacaaataaatcacca

SEQ ID NO: 52834 - DNA, 50 bp, synthetic construct
  source 1..50: mol_type = other DNA
aacgtcacaataaaaacgtatcctcaccccaaaaaacgaataaatcaccg

SEQ ID NO: 52835 - DNA, 50 bp, synthetic construct
  source 1..50: mol_type = other DNA
acctaaaaaaactacaaataaaaactctttaaaaacatatataaatttca

SEQ ID NO: 52836 - DNA, 50 bp, synthetic construct
  source 1..50: mol_type = other DNA
gcctaaaaaaactacgaataaaaactctttaaaaacgtatataaatttcg

SEQ ID NO: 52837 - DNA, 50 bp, synthetic construct
  source 1..50: mol_type = other DNA
accttctcccaccacctaaaaaaactacaaataaaaactctttaaaaaca

SEQ ID NO: 52838 - DNA, 50 bp, synthetic construct
  source 1..50: mol_type = other DNA
accttctcccgccgcctaaaaaaactacgaataaaaactctttaaaaacg

SEQ ID NO: 52839 - DNA, 50 bp, synthetic construct
  source 1..50: mol_type = other DNA
atataaacacaaccccaaataacaaccactcattaactaaaaacatcaca

SEQ ID NO: 52840 - DNA, 50 bp, synthetic construct
  source 1..50: mol_type = other DNA
atataaacacgaccccgaataacgaccgctcattaactaaaaacgtcacg

SEQ ID NO: 52841 - DNA, 50 bp, synthetic construct
  source 1..50: mol_type = other DNA
tattccatttaactaaacattaaaaattattccacactcccttacatcca

SEQ ID NO: 52842 - DNA, 50 bp, synthetic construct
  source 1..50: mol_type = other DNA
tattccgtttaactaaacgttaaaaattattccacgctcccttacatccg

SEQ ID NO: 52843 - DNA, 50 bp, synthetic construct
  source 1..50: mol_type = other DNA
acaaccaaatacaaaaaaacataaaacaactcccaacatccaactaaaca

SEQ ID NO: 52844 - DNA, 50 bp, synthetic construct
  source 1..50: mol_type = other DNA
acaaccgaatacaaaaaaacgtaaaacaactcccaacgtccaactaaacg

SEQ ID NO: 52845 - DNA, 50 bp, synthetic construct
  source 1..50: mol_type = other DNA
acaactcccaacatccaactaaacaaaacaaaatcaaaacaaaaaccaca

SEQ ID NO: 52846 - DNA, 50 bp, synthetic construct
  source 1..50: mol_type = other DNA
acaactcccaacgtccaactaaacgaaacaaaatcaaaacaaaaaccacg

SEQ ID NO: 52847 - DNA, 50 bp, synthetic construct
  source 1..50: mol_type = other DNA
tccatttatttttcaaaataaaattatcccaatacccaattccccccaca

SEQ ID NO: 52848 - DNA, 50 bp, synthetic construct
  source 1..50: mol_type = other DNA
tccatttatttttcaaaataaaattatcccgatacccaattccccccgcg

SEQ ID NO: 52849 - DNA, 50 bp, synthetic construct
  source 1..50: mol_type = other DNA
ctaaataactaaaattataaacacctaccaccatacccaactaattttca

SEQ ID NO: 52850 - DNA, 50 bp, synthetic construct
  source 1..50: mol_type = other DNA
ctaaataactaaaattataaacacctaccaccatacccgactaattttcg

SEQ ID NO: 52851 - DNA, 50 bp, synthetic construct
  source 1..50: mol_type = other DNA
tacaataaaccaaaattacactccacctaaacaacaaaaacaaaactcca

SEQ ID NO: 52852 - DNA, 50 bp, synthetic construct
  source 1..50: mol_type = other DNA
tacgataaaccaaaattacactccgcctaaacaacaaaaacgaaactccg

SEQ ID NO: 52853 - DNA, 50 bp, synthetic construct
  source 1..50: mol_type = other DNA
taaacaaaaaaccataaaaataaatataaaaccaaacacaataactcaca

SEQ ID NO: 52854 - DNA, 50 bp, synthetic construct
  source 1..50: mol_type = other DNA
taaacaaaaaaccataaaaataaatataaaaccaaacgcaataactcacg

SEQ ID NO: 52855 - DNA, 50 bp, synthetic construct
  source 1..50: mol_type = other DNA
caaaccaaaaacactaaaaaatcaaaacaaaaattcaaaaccaaataaca

SEQ ID NO: 52856 - DNA, 50 bp, synthetic construct
  source 1..50: mol_type = other DNA
cgaaccgaaaacgctaaaaaatcgaaacgaaaattcgaaaccgaataacg

SEQ ID NO: 52857 - DNA, 50 bp, synthetic construct
  source 1..50: mol_type = other DNA
acaataataaaaacccaaacacaaaccaaaaacactaaaaaatcaaaaca

SEQ ID NO: 52858 - DNA, 50 bp, synthetic construct
  source 1..50: mol_type = other DNA
acgataataaaaacccaaacgcgaaccgaaaacgctaaaaaatcgaaacg

SEQ ID NO: 52859 - DNA, 50 bp, synthetic construct
  source 1..50: mol_type = other DNA
aactcaaactcccaaaaaacaaaaccaaaaaaaacttaacaacacaaaca

SEQ ID NO: 52860 - DNA, 50 bp, synthetic construct
  source 1..50: mol_type = other DNA
gactcgaactcccgaaaaacaaaaccgaaaaaaacttaacaacgcaaacg

SEQ ID NO: 52861 - DNA, 50 bp, synthetic construct
  source 1..50: mol_type = other DNA
aaaacaaaaccaaaaaaaacttaacaacacaaacacaaaatacttcccca

SEQ ID NO: 52862 - DNA, 50 bp, synthetic construct
  source 1..50: mol_type = other DNA
aaaacaaaaccgaaaaaaacttaacaacgcaaacgcaaaatacttccccg

SEQ ID NO: 52863 - DNA, 50 bp, synthetic construct
  source 1..50: mol_type = other DNA
taaacacactaaaaaataaaatctaaccaaaaaaactccatttttaccca

SEQ ID NO: 52864 - DNA, 50 bp, synthetic construct
  source 1..50: mol_type = other DNA
taaacgcgctaaaaaataaaatctaaccaaaaaaactccatttttacccg

SEQ ID NO: 52865 - DNA, 50 bp, synthetic construct
  source 1..50: mol_type = other DNA
taatcctaaaccctcaaacaaaaaaaatacaactaaaaaaaactcaatca

SEQ ID NO: 52866 - DNA, 50 bp, synthetic construct
  source 1..50: mol_type = other DNA
taatcctaaaccctcaaacaaaaaaaatacgactaaaaaaaactcaatcg

SEQ ID NO: 52867 - DNA, 50 bp, synthetic construct
  source 1..50: mol_type = other DNA
aaaactaaactacaataaaaaaacacccccacccccaataaacaacaaca

SEQ ID NO: 52868 - DNA, 50 bp, synthetic construct
  source 1..50: mol_type = other DNA
aaaactaaactacgataaaaaaacacccccgcccccaataaacaacaacg

SEQ ID NO: 52869 - DNA, 50 bp, synthetic construct
  source 1..50: mol_type = other DNA
tttgttattattaatggtttggttttgggtgaggtttttagtttgggttt

SEQ ID NO: 52870 - DNA, 50 bp, synthetic construct
  source 1..50: mol_type = other DNA
ttcgttattattaacggtttggttttgggcgaggtttttagtttgggttc

SEQ ID NO: 52871 - DNA, 50 bp, synthetic construct
  source 1..50: mol_type = other DNA
acaaacccaaactaaaaacctcacccaaaaccaaaccattaataataaca

SEQ ID NO: 52872 - DNA, 50 bp, synthetic construct
  source 1..50: mol_type = other DNA
acgaacccaaactaaaaacctcgcccaaaaccaaaccgttaataataacg

SEQ ID NO: 52873 - DNA, 50 bp, synthetic construct
  source 1..50: mol_type = other DNA
aactaaaaacctcacccaaaaccaaaccattaataataacaaaaccccca

SEQ ID NO: 52874 - DNA, 50 bp, synthetic construct
  source 1..50: mol_type = other DNA
aactaaaaacctcgcccaaaaccaaaccgttaataataacgaaacccccg

SEQ ID NO: 52875 - DNA, 50 bp, synthetic construct
  source 1..50: mol_type = other DNA
aaccatttctccaaccaacaaatctaataaaaatcccacaactaaaaaca

SEQ ID NO: 52876 - DNA, 50 bp, synthetic construct
  source 1..50: mol_type = other DNA
aaccatttctccgaccaacgaatctaataaaaatcccacgactaaaaacg

SEQ ID NO: 52877 - DNA, 50 bp, synthetic construct
  source 1..50: mol_type = other DNA
tacaaaaaaccccacaaactaaaaaaccccaactaacaaccatttctcca

SEQ ID NO: 52878 - DNA, 50 bp, synthetic construct
  source 1..50: mol_type = other DNA
tacgaaaaaccccacaaactaaaaaaccccaactaacaaccatttctccg

SEQ ID NO: 52879 - DNA, 50 bp, synthetic construct
  source 1..50: mol_type = other DNA
aaaacaaaaacctcttccctccccaacacttctctacaataatatccaca

SEQ ID NO: 52880 - DNA, 50 bp, synthetic construct
  source 1..50: mol_type = other DNA
aaaacaaaaacctcttccctccccaacgcttctctacaataatatccacg

SEQ ID NO: 52881 - DNA, 50 bp, synthetic construct
  source 1..50: mol_type = other DNA
aaaactaaaaaaaattcacatttcacaacaaaaacaaaaaacaaaccaca

SEQ ID NO: 52882 - DNA, 50 bp, synthetic construct
  source 1..50: mol_type = other DNA
gaaactaaaaaaaattcacgtttcacaacaaaaacaaaaaacgaaccacg

SEQ ID NO: 52883 - DNA, 50 bp, synthetic construct
  source 1..50: mol_type = other DNA
actaaaaaaaattcacatttcacaacaaaaacaaaaaacaaaccacacca

SEQ ID NO: 52884 - DNA, 50 bp, synthetic construct
  source 1..50: mol_type = other DNA
actaaaaaaaattcacgtttcacaacaaaaacaaaaaacgaaccacgccg

SEQ ID NO: 52885 - DNA, 50 bp, synthetic construct
  source 1..50: mol_type = other DNA
cattccaaactccttcccaaatcccatcaatattaaaaaatcacactaca

SEQ ID NO: 52886 - DNA, 50 bp, synthetic construct
  source 1..50: mol_type = other DNA
cattccgaactccttcccaaatcccatcgatattaaaaaatcacactacg

SEQ ID NO: 52887 - DNA, 50 bp, synthetic construct
  source 1..50: mol_type = other DNA
acaaacacctaaaattataaactaatcccaaaaaatatccaaaaacctca

SEQ ID NO: 52888 - DNA, 50 bp, synthetic construct
  source 1..50: mol_type = other DNA
gcgaacgcctaaaattataaactaatcccgaaaaatatccgaaaacctcg

SEQ ID NO: 52889 - DNA, 50 bp, synthetic construct
  source 1..50: mol_type = other DNA
aacacctaaaattataaactaatcccaaaaaatatccaaaaacctcaaca

SEQ ID NO: 52890 - DNA, 50 bp, synthetic construct
  source 1..50: mol_type = other DNA
aacgcctaaaattataaactaatcccgaaaaatatccgaaaacctcgacg

SEQ ID NO: 52891 - DNA, 50 bp, synthetic construct
  source 1..50: mol_type = other DNA
cacctaaaattataaactaatcccaaaaaatatccaaaaacctcaacaca

SEQ ID NO: 52892 - DNA, 50 bp, synthetic construct
  source 1..50: mol_type = other DNA
cgcctaaaattataaactaatcccgaaaaatatccgaaaacctcgacgcg

SEQ ID NO: 52893 - DNA, 50 bp, synthetic construct
  source 1..50: mol_type = other DNA
ctaaaattataaactaatcccaaaaaatatccaaaaacctcaacacacca

SEQ ID NO: 52894 - DNA, 50 bp, synthetic construct
  source 1..50: mol_type = other DNA
ctaaaattataaactaatcccgaaaaatatccgaaaacctcgacgcgccg

SEQ ID NO: 52895 - DNA, 50 bp, synthetic construct
  source 1..50: mol_type = other DNA
aaaaaaaaactaataaacaaaatatccccaaaaaaactaaacttacacca

SEQ ID NO: 52896 - DNA, 50 bp, synthetic construct
  source 1..50: mol_type = other DNA
aaaaaaaaactaataaacgaaatatccccgaaaaaactaaacttacgccg

SEQ ID NO: 52897 - DNA, 50 bp, synthetic construct
  source 1..50: mol_type = other DNA
aaaaactaataaacaaaatatccccaaaaaaactaaacttacaccaccca

SEQ ID NO: 52898 - DNA, 50 bp, synthetic construct
  source 1..50: mol_type = other DNA
aaaaactaataaacgaaatatccccgaaaaaactaaacttacgccgcccg

SEQ ID NO: 52899 - DNA, 50 bp, synthetic construct
  source 1..50: mol_type = other DNA
taacctacataaacaacaaaccaataaatataaccaaacaacacttctca

SEQ ID NO: 52900 - DNA, 50 bp, synthetic construct
  source 1..50: mol_type = other DNA
taacctacgtaaacgacaaaccgataaatataaccaaacgacgcttctcg

SEQ ID NO: 52901 - DNA, 50 bp, synthetic construct
  source 1..50: mol_type = other DNA
aaaccaataaatataaccaaacaacacttctcatccaacataaaataaca

SEQ ID NO: 52902 - DNA, 50 bp, synthetic construct
  source 1..50: mol_type = other DNA
aaaccgataaatataaccaaacgacgcttctcgtccgacgtaaaataacg

SEQ ID NO: 52903 - DNA, 50 bp, synthetic construct
  source 1..50: mol_type = other DNA
taaatataaccaaacaacacttctcatccaacataaaataacaattacca

SEQ ID NO: 52904 - DNA, 50 bp, synthetic construct
  source 1..50: mol_type = other DNA
taaatataaccaaacgacgcttctcgtccgacgtaaaataacgattaccg

SEQ ID NO: 52905 - DNA, 50 bp, synthetic construct
  source 1..50: mol_type = other DNA
aaaacaacaaaaaaacaatctactacttcaaaaaacactcccacacaaca

SEQ ID NO: 52906 - DNA, 50 bp, synthetic construct
  source 1..50: mol_type = other DNA
aaaacgacgaaaaaacaatctactacttcaaaaaacgctcccgcgcaacg

SEQ ID NO: 52907 - DNA, 50 bp, synthetic construct
  source 1..50: mol_type = other DNA
catctaaaacaacaaaaaaacaatctactacttcaaaaaacactcccaca

SEQ ID NO: 52908 - DNA, 50 bp, synthetic construct
  source 1..50: mol_type = other DNA
catctaaaacgacgaaaaaacaatctactacttcaaaaaacgctcccgcg

SEQ ID NO: 52909 - DNA, 50 bp, synthetic construct
  source 1..50: mol_type = other DNA
ccttaaacactacacaaaaacactccttaaaacaataaactatctcctca

SEQ ID NO: 52910 - DNA, 50 bp, synthetic construct
  source 1..50: mol_type = other DNA
ccttaaacgctacgcgaaaacgctccttaaaacaataaactatctcctcg

SEQ ID NO: 52911 - DNA, 50 bp, synthetic construct
  source 1..50: mol_type = other DNA
caaatatcaactacacaaaaaattcccactacccaaaaccatctaaaaca

SEQ ID NO: 52912 - DNA, 50 bp, synthetic construct
  source 1..50: mol_type = other DNA
caaatatcgactacgcaaaaaattcccgctacccaaaaccatctaaaacg

SEQ ID NO: 52913 - DNA, 50 bp, synthetic construct
  source 1..50: mol_type = other DNA
actatctcctcaccatcccaaataatcttaaacaacaaaaacttcttaca

SEQ ID NO: 52914 - DNA, 50 bp, synthetic construct
  source 1..50: mol_type = other DNA
actatctcctcgccgtcccaaataatcttaaacaacgaaaacttcttacg

SEQ ID NO: 52915 - DNA, 50 bp, synthetic construct
  source 1..50: mol_type = other DNA
aaacaacaaaaacttcttacacaatcaatacttatccactacaccaaaca

SEQ ID NO: 52916 - DNA, 50 bp, synthetic construct
  source 1..50: mol_type = other DNA
aaacaacgaaaacttcttacgcaatcgatacttatccactacgccaaacg

SEQ ID NO: 52917 - DNA, 50 bp, synthetic construct
  source 1..50: mol_type = other DNA
cataataacacacacacaaataaaaatcctacaaaaaaacataataaaca

SEQ ID NO: 52918 - DNA, 50 bp, synthetic construct
  source 1..50: mol_type = other DNA
cataataacgcgcgcgcaaataaaaatcctacaaaaaaacgtaataaacg

SEQ ID NO: 52919 - DNA, 50 bp, synthetic construct
  source 1..50: mol_type = other DNA
aataacacacacacaaataaaaatcctacaaaaaaacataataaacaaca

SEQ ID NO: 52920 - DNA, 50 bp, synthetic construct
  source 1..50: mol_type = other DNA
aataacgcgcgcgcaaataaaaatcctacaaaaaaacgtaataaacgacg

SEQ ID NO: 52921 - DNA, 50 bp, synthetic construct
  source 1..50: mol_type = other DNA
caaaattacaaaacataactaccttacctacaaaaccaaacacaaaacca

SEQ ID NO: 52922 - DNA, 50 bp, synthetic construct
  source 1..50: mol_type = other DNA
caaaattacaaaacataactaccttacctacgaaaccgaacgcgaaaccg

SEQ ID NO: 52923 - DNA, 50 bp, synthetic construct
  source 1..50: mol_type = other DNA
acttcccaaaattacaaaacataactaccttacctacaaaaccaaacaca

SEQ ID NO: 52924 - DNA, 50 bp, synthetic construct
  source 1..50: mol_type = other DNA
acttcccaaaattacaaaacataactaccttacctacgaaaccgaacgcg

SEQ ID NO: 52925 - DNA, 50 bp, synthetic construct
  source 1..50: mol_type = other DNA
aacactccccaaaacaaaacatcatacacaaaaaaactttacactttaca

SEQ ID NO: 52926 - DNA, 50 bp, synthetic construct
  source 1..50: mol_type = other DNA
aacgctccccaaaacaaaacgtcatacacaaaaaaactttacactttacg

SEQ ID NO: 52927 - DNA, 50 bp, synthetic construct
  source 1..50: mol_type = other DNA
cataaataaacaaactacaaacctaaaaaaacaacaaaccaaaccatcca

SEQ ID NO: 52928 - DNA, 50 bp, synthetic construct
  source 1..50: mol_type = other DNA
cgtaaataaacaaactacaaacctaaaaaaacaacaaaccgaaccgtccg

SEQ ID NO: 52929 - DNA, 50 bp, synthetic construct
  source 1..50: mol_type = other DNA
actaaaaaacaaacccaaatcacaaaactaaaactaaacaaaaacccaca

SEQ ID NO: 52930 - DNA, 50 bp, synthetic construct
  source 1..50: mol_type = other DNA
gctaaaaaacgaacccgaatcacaaaactaaaactaaacgaaaacccacg

SEQ ID NO: 52931 - DNA, 50 bp, synthetic construct
  source 1..50: mol_type = other DNA
taaacaaaaacccacactcaaaacaattataaactaacaaacaataaaca

SEQ ID NO: 52932 - DNA, 50 bp, synthetic construct
  source 1..50: mol_type = other DNA
taaacgaaaacccacgctcgaaacgattataaactaacaaacgataaacg

SEQ ID NO: 52933 - DNA, 50 bp, synthetic construct
  source 1..50: mol_type = other DNA
tccaaaaccccattaaaaaactaaatacccaaaacacaacacaaaaacca

SEQ ID NO: 52934 - DNA, 50 bp, synthetic construct
  source 1..50: mol_type = other DNA
tccgaaaccccgttaaaaaactaaatacccgaaacacgacacaaaaaccg

SEQ ID NO: 52935 - DNA, 50 bp, synthetic construct
  source 1..50: mol_type = other DNA
cactcaaaacaattataaactaacaaacaataaacacaacttctatacca

SEQ ID NO: 52936 - DNA, 50 bp, synthetic construct
  source 1..50: mol_type = other DNA
cgctcgaaacgattataaactaacaaacgataaacgcgacttctataccg

SEQ ID NO: 52937 - DNA, 50 bp, synthetic construct
  source 1..50: mol_type = other DNA
aacaattataaactaacaaacaataaacacaacttctataccatacccca

SEQ ID NO: 52938 - DNA, 50 bp, synthetic construct
  source 1..50: mol_type = other DNA
aacgattataaactaacaaacgataaacgcgacttctataccgtaccccg

SEQ ID NO: 52939 - DNA, 50 bp, synthetic construct
  source 1..50: mol_type = other DNA
ttccaacaaaaccccaaaatcaaaaacaattctaaaattcaaaaaacaca

SEQ ID NO: 52940 - DNA, 50 bp, synthetic construct
  source 1..50: mol_type = other DNA
ttccaacgaaaccccgaaatcgaaaacaattctaaaattcaaaaaacgcg

SEQ ID NO: 52941 - DNA, 50 bp, synthetic construct
  source 1..50: mol_type = other DNA
atcaaaaacaattctaaaattcaaaaaacacaaacaactcctaaacaaca

SEQ ID NO: 52942 - DNA, 50 bp, synthetic construct
  source 1..50: mol_type = other DNA
atcgaaaacaattctaaaattcaaaaaacgcgaacgactcctaaacgacg

SEQ ID NO: 52943 - DNA, 50 bp, synthetic construct
  source 1..50: mol_type = other DNA
attctaaaattcaaaaaacacaaacaactcctaaacaacaccaaactaca

SEQ ID NO: 52944 - DNA, 50 bp, synthetic construct
  source 1..50: mol_type = other DNA
attctaaaattcaaaaaacgcgaacgactcctaaacgacgccaaactacg

SEQ ID NO: 52945 - DNA, 50 bp, synthetic construct
  source 1..50: mol_type = other DNA
tattctatctcataccaccaccctaaactacattaaattaataacccaca

SEQ ID NO: 52946 - DNA, 50 bp, synthetic construct
  source 1..50: mol_type = other DNA
tattctatctcgtaccgccgccctaaactacattaaattaataacccacg

SEQ ID NO: 52947 - DNA, 50 bp, synthetic construct
  source 1..50: mol_type = other DNA
aaaacatacaaataaactaacaacaactataaactattaaaacaaaaaca

SEQ ID NO: 52948 - DNA, 50 bp, synthetic construct
  source 1..50: mol_type = other DNA
gaaacgtacgaataaactaacaacaactataaactattaaaacgaaaacg

SEQ ID NO: 52949 - DNA, 50 bp, synthetic construct
  source 1..50: mol_type = other DNA
aaattcaaaacatacaaataaactaacaacaactataaactattaaaaca

SEQ ID NO: 52950 - DNA, 50 bp, synthetic construct
  source 1..50: mol_type = other DNA
aaattcgaaacgtacgaataaactaacaacaactataaactattaaaacg

SEQ ID NO: 52951 - DNA, 50 bp, synthetic construct
  source 1..50: mol_type = other DNA
accactaaaaaacaaccaataacaaattcaaacaaaattcaaaacataca

SEQ ID NO: 52952 - DNA, 50 bp, synthetic construct
  source 1..50: mol_type = other DNA
accgctaaaaaacaaccaataacgaattcgaacgaaattcgaaacgtacg

SEQ ID NO: 52953 - DNA, 50 bp, synthetic construct
  source 1..50: mol_type = other DNA
acaaaccactaaaaaacaaccaataacaaattcaaacaaaattcaaaaca

SEQ ID NO: 52954 - DNA, 50 bp, synthetic construct
  source 1..50: mol_type = other DNA
acaaaccgctaaaaaacaaccaataacgaattcgaacgaaattcgaaacg

SEQ ID NO: 52955 - DNA, 50 bp, synthetic construct
  source 1..50: mol_type = other DNA
tcaacacaaaccactaaaaaacaaccaataacaaattcaaacaaaattca

SEQ ID NO: 52956 - DNA, 50 bp, synthetic construct
  source 1..50: mol_type = other DNA
tcaacacaaaccgctaaaaaacaaccaataacgaattcgaacgaaattcg

SEQ ID NO: 52957 - DNA, 50 bp, synthetic construct
  source 1..50: mol_type = other DNA
caaccaatcaacacaaaccactaaaaaacaaccaataacaaattcaaaca

SEQ ID NO: 52958 - DNA, 50 bp, synthetic construct
  source 1..50: mol_type = other DNA
caaccaatcaacacaaaccgctaaaaaacaaccaataacgaattcgaacg

SEQ ID NO: 52959 - DNA, 50 bp, synthetic construct
  source 1..50: mol_type = other DNA
ttaactacacatttacaaaactaaacccacaacaaaaaaacaaatcttca

SEQ ID NO: 52960 - DNA, 50 bp, synthetic construct
  source 1..50: mol_type = other DNA
ttaactacgcatttacgaaactaaacccacgacaaaaaaacgaatcttcg

SEQ ID NO: 52961 - DNA, 50 bp, synthetic construct
  source 1..50: mol_type = other DNA
ccaaccccacaaatacacaactaaacaaataacaaaaaacaaataaaaca

SEQ ID NO: 52962 - DNA, 50 bp, synthetic construct
  source 1..50: mol_type = other DNA
ccaaccccgcaaatacgcaactaaacgaataacaaaaaacgaataaaacg

SEQ ID NO: 52963 - DNA, 50 bp, synthetic construct
  source 1..50: mol_type = other DNA
cacaaatacacaactaaacaaataacaaaaaacaaataaaacacaaaaca

SEQ ID NO: 52964 - DNA, 50 bp, synthetic construct
  source 1..50: mol_type = other DNA
cgcaaatacgcaactaaacgaataacaaaaaacgaataaaacgcgaaacg

SEQ ID NO: 52965 - DNA, 50 bp, synthetic construct
  source 1..50: mol_type = other DNA
caaatacacaactaaacaaataacaaaaaacaaataaaacacaaaacaca

SEQ ID NO: 52966 - DNA, 50 bp, synthetic construct
  source 1..50: mol_type = other DNA
caaatacgcaactaaacgaataacaaaaaacgaataaaacgcgaaacgcg

SEQ ID NO: 52967 - DNA, 50 bp, synthetic construct
  source 1..50: mol_type = other DNA
atacacaactaaacaaataacaaaaaacaaataaaacacaaaacacaaca

SEQ ID NO: 52968 - DNA, 50 bp, synthetic construct
  source 1..50: mol_type = other DNA
atacgcaactaaacgaataacaaaaaacgaataaaacgcgaaacgcgacg

SEQ ID NO: 52969 - DNA, 50 bp, synthetic construct
  source 1..50: mol_type = other DNA
aaaaaaacataaacaaccaaacataccctaacaaaaaacaacaaataaca

SEQ ID NO: 52970 - DNA, 50 bp, synthetic construct
  source 1..50: mol_type = other DNA
aaaaaaacgtaaacaaccgaacgtaccctaacaaaaaacaacaaataacg

SEQ ID NO: 52971 - DNA, 50 bp, synthetic construct
  source 1..50: mol_type = other DNA
aaacccaacccaaccctcaacaataaaacaaaaaacaacaaaaaaaatca

SEQ ID NO: 52972 - DNA, 50 bp, synthetic construct
  source 1..50: mol_type = other DNA
aaacccaacccaaccctcaacgataaaacgaaaaacaacgaaaaaaatcg

SEQ ID NO: 52973 - DNA, 50 bp, synthetic construct
  source 1..50: mol_type = other DNA
aaaaaaaaccacaaataaatccctcatatatccccttccccaaaaaacca

SEQ ID NO: 52974 - DNA, 50 bp, synthetic construct
  source 1..50: mol_type = other DNA
aaaaaaaaccacaaataaatccctcatatatccccttccccgaaaaaccg

SEQ ID NO: 52975 - DNA, 50 bp, synthetic construct
  source 1..50: mol_type = other DNA
aaaacaaaaccacaactaaatacaaaaacaaataaaattaaatctaaaca

SEQ ID NO: 52976 - DNA, 50 bp, synthetic construct
  source 1..50: mol_type = other DNA
aaaacgaaaccacgactaaatacaaaaacgaataaaattaaatctaaacg

SEQ ID NO: 52977 - DNA, 50 bp, synthetic construct
  source 1..50: mol_type = other DNA
ataaacataatataacaaataaaacaaaaccacaactaaatacaaaaaca

SEQ ID NO: 52978 - DNA, 50 bp, synthetic construct
  source 1..50: mol_type = other DNA
ataaacgtaatataacaaataaaacgaaaccacgactaaatacaaaaacg

SEQ ID NO: 52979 - DNA, 50 bp, synthetic construct
  source 1..50: mol_type = other DNA
acaaaacttaaaaccaataaacataatataacaaataaaacaaaaccaca

SEQ ID NO: 52980 - DNA, 50 bp, synthetic construct
  source 1..50: mol_type = other DNA
acgaaacttaaaaccaataaacgtaatataacaaataaaacgaaaccacg

SEQ ID NO: 52981 - DNA, 50 bp, synthetic construct
  source 1..50: mol_type = other DNA
aactaaaaacaaaacttaaaaccaataaacataatataacaaataaaaca

SEQ ID NO: 52982 - DNA, 50 bp, synthetic construct
  source 1..50: mol_type = other DNA
aactaaaaacgaaacttaaaaccaataaacgtaatataacaaataaaacg

SEQ ID NO: 52983 - DNA, 50 bp, synthetic construct
  source 1..50: mol_type = other DNA
aacaaaataaaccaaaccaaacaaaaacctaacttaactcataataaaca

SEQ ID NO: 52984 - DNA, 50 bp, synthetic construct
  source 1..50: mol_type = other DNA
aacgaaataaaccgaaccgaacgaaaacctaacttaactcgtaataaacg

SEQ ID NO: 52985 - DNA, 50 bp, synthetic construct
  source 1..50: mol_type = other DNA
ctaaaaataatcaaacacaaaacattcaacaaaataaaccaaaccaaaca

SEQ ID NO: 52986 - DNA, 50 bp, synthetic construct
  source 1..50: mol_type = other DNA
ctaaaaataatcgaacgcgaaacgttcaacgaaataaaccgaaccgaacg

SEQ ID NO: 52987 - DNA, 50 bp, synthetic construct
  source 1..50: mol_type = other DNA
aattctaaaaataatcaaacacaaaacattcaacaaaataaaccaaacca

SEQ ID NO: 52988 - DNA, 50 bp, synthetic construct
  source 1..50: mol_type = other DNA
aattctaaaaataatcgaacgcgaaacgttcaacgaaataaaccgaaccg

SEQ ID NO: 52989 - DNA, 50 bp, synthetic construct
  source 1..50: mol_type = other DNA
ttcaaaattctaaaaataatcaaacacaaaacattcaacaaaataaacca

SEQ ID NO: 52990 - DNA, 50 bp, synthetic construct
  source 1..50: mol_type = other DNA
ttcgaaattctaaaaataatcgaacgcgaaacgttcaacgaaataaaccg

SEQ ID NO: 52991 - DNA, 50 bp, synthetic construct
  source 1..50: mol_type = other DNA
aaaaaacaacttcaaaattctaaaaataatcaaacacaaaacattcaaca

SEQ ID NO: 52992 - DNA, 50 bp, synthetic construct
  source 1..50: mol_type = other DNA
aaaaaacgacttcgaaattctaaaaataatcgaacgcgaaacgttcaacg

SEQ ID NO: 52993 - DNA, 50 bp, synthetic construct
  source 1..50: mol_type = other DNA
aatccaactacaaaaaaacaacttcaaaattctaaaaataatcaaacaca

SEQ ID NO: 52994 - DNA, 50 bp, synthetic construct
  source 1..50: mol_type = other DNA
aatccgactacaaaaaaacgacttcgaaattctaaaaataatcgaacgcg

SEQ ID NO: 52995 - DNA, 50 bp, synthetic construct
  source 1..50: mol_type = other DNA
taaaaaaatccaactacaaaaaaacaacttcaaaattctaaaaataatca

SEQ ID NO: 52996 - DNA, 50 bp, synthetic construct
  source 1..50: mol_type = other DNA
taaaaaaatccgactacaaaaaaacgacttcgaaattctaaaaataatcg

SEQ ID NO: 52997 - DNA, 50 bp, synthetic construct
  source 1..50: mol_type = other DNA
accccaaaatctcaattcctataaaccatataaatcaaccaccattccca

SEQ ID NO: 52998 - DNA, 50 bp, synthetic construct
  source 1..50: mol_type = other DNA
accccaaaatctcgattcctataaaccgtataaatcaaccaccattcccg

SEQ ID NO: 52999 - DNA, 50 bp, synthetic construct
  source 1..50: mol_type = other DNA
ctaaaaaacacaaaaacccaaaataacaaaaataataactaacccacaca

SEQ ID NO: 53000 - DNA, 50 bp, synthetic construct
  source 1..50: mol_type = other DNA
ctaaaaaacgcaaaaacccgaaataacgaaaataataactaacccacacg

SEQ ID NO: 53001 - DNA, 50 bp, synthetic construct
  source 1..50: mol_type = other DNA
aacccaaaataacaaaaataataactaacccacacaactcataaaaacca

SEQ ID NO: 53002 - DNA, 50 bp, synthetic construct
  source 1..50: mol_type = other DNA
aacccgaaataacgaaaataataactaacccacacgactcataaaaaccg

SEQ ID NO: 53003 - DNA, 50 bp, synthetic construct
  source 1..50: mol_type = other DNA
aaacactaataacacctatctacaaaactaattctcccacaaaacccaca

SEQ ID NO: 53004 - DNA, 50 bp, synthetic construct
  source 1..50: mol_type = other DNA
aaacactaataacgcctatctacaaaactaattctcccacaaaacccgcg

SEQ ID NO: 53005 - DNA, 50 bp, synthetic construct
  source 1..50: mol_type = other DNA
aaaaacaaaaacaaaaccaaacaaaaactacaataactaaaacaacacca

SEQ ID NO: 53006 - DNA, 50 bp, synthetic construct
  source 1..50: mol_type = other DNA
gaaaacgaaaacaaaaccgaacgaaaactacgataactaaaacgacaccg

SEQ ID NO: 53007 - DNA, 50 bp, synthetic construct
  source 1..50: mol_type = other DNA
caaaaccaaacaaaaactacaataactaaaacaacaccaaaatctaaaca

SEQ ID NO: 53008 - DNA, 50 bp, synthetic construct
  source 1..50: mol_type = other DNA
caaaaccgaacgaaaactacgataactaaaacgacaccgaaatctaaacg

SEQ ID NO: 53009 - DNA, 50 bp, synthetic construct
  source 1..50: mol_type = other DNA
aaataacttataaaaaccctcacacatacaaaattacaacttaatctcca

SEQ ID NO: 53010 - DNA, 50 bp, synthetic construct
  source 1..50: mol_type = other DNA
aaataacttataaaaaccctcgcgcgtacgaaattacgacttaatctccg

SEQ ID NO: 53011 - DNA, 50 bp, synthetic construct
  source 1..50: mol_type = other DNA
ataacttataaaaaccctcacacatacaaaattacaacttaatctccaca

SEQ ID NO: 53012 - DNA, 50 bp, synthetic construct
  source 1..50: mol_type = other DNA
ataacttataaaaaccctcgcgcgtacgaaattacgacttaatctccgcg

SEQ ID NO: 53013 - DNA, 50 bp, synthetic construct
  source 1..50: mol_type = other DNA
acaataaaaaaaaacataaccaattaaaaaactcaaatccttaacaacca

SEQ ID NO: 53014 - DNA, 50 bp, synthetic construct
  source 1..50: mol_type = other DNA
gcaataaaaaaaaacgtaaccaattaaaaaactcaaatccttaacaaccg

SEQ ID NO: 53015 - DNA, 50 bp, synthetic construct
  source 1..50: mol_type = other DNA
aataaaaaaaaacataaccaattaaaaaactcaaatccttaacaaccaca

SEQ ID NO: 53016 - DNA, 50 bp, synthetic construct
  source 1..50: mol_type = other DNA
aataaaaaaaaacgtaaccaattaaaaaactcaaatccttaacaaccgcg

SEQ ID NO: 53017 - DNA, 50 bp, synthetic construct
  source 1..50: mol_type = other DNA
aaaactcaaatccttaacaaccacaccctaaaaacatttacctaacaaca

SEQ ID NO: 53018 - DNA, 50 bp, synthetic construct
  source 1..50: mol_type = other DNA
aaaactcaaatccttaacaaccgcgccctaaaaacgtttacctaacaacg

SEQ ID NO: 53019 - DNA, 50 bp, synthetic construct
  source 1..50: mol_type = other DNA
aacaacctaaaaaccccttatctatcctaaaatctctaaaccacaccaca

SEQ ID NO: 53020 - DNA, 50 bp, synthetic construct
  source 1..50: mol_type = other DNA
aacgacctaaaaaccccttatctatcctaaaatctctaaaccgcaccacg

SEQ ID NO: 53021 - DNA, 50 bp, synthetic construct
  source 1..50: mol_type = other DNA
aaccaaaaacatttcactaaacatctaaaaatatctactacctctcctca

SEQ ID NO: 53022 - DNA, 50 bp, synthetic construct
  source 1..50: mol_type = other DNA
aaccaaaaacgtttcgctaaacgtctaaaaatatctactacctctcctcg

SEQ ID NO: 53023 - DNA, 50 bp, synthetic construct
  source 1..50: mol_type = other DNA
aacatttcactaaacatctaaaaatatctactacctctcctcaaaatcca

SEQ ID NO: 53024 - DNA, 50 bp, synthetic construct
  source 1..50: mol_type = other DNA
aacgtttcgctaaacgtctaaaaatatctactacctctcctcgaaatccg

SEQ ID NO: 53025 - DNA, 50 bp, synthetic construct
  source 1..50: mol_type = other DNA
taaacttaatcccaactataccacctctaaaaaacctaaaaaatcctcca

SEQ ID NO: 53026 - DNA, 50 bp, synthetic construct
  source 1..50: mol_type = other DNA
taaacttaatcccgactataccgcctctaaaaaacctaaaaaatcctccg

SEQ ID NO: 53027 - DNA, 50 bp, synthetic construct
  source 1..50: mol_type = other DNA
aaaaaccattacccataaaaaacacaaaaaacaaaccaaaataaattcca

SEQ ID NO: 53028 - DNA, 50 bp, synthetic construct
  source 1..50: mol_type = other DNA
aaaaaccgttacccgtaaaaaacgcgaaaaacgaaccaaaataaattccg

SEQ ID NO: 53029 - DNA, 50 bp, synthetic construct
  source 1..50: mol_type = other DNA
aaaccattacccataaaaaacacaaaaaacaaaccaaaataaattccaca

SEQ ID NO: 53030 - DNA, 50 bp, synthetic construct
  source 1..50: mol_type = other DNA
aaaccgttacccgtaaaaaacgcgaaaaacgaaccaaaataaattccgcg

SEQ ID NO: 53031 - DNA, 50 bp, synthetic construct
  source 1..50: mol_type = other DNA
taaaaaacacaaaaaacaaaccaaaataaattccacacaaactctaaaca

SEQ ID NO: 53032 - DNA, 50 bp, synthetic construct
  source 1..50: mol_type = other DNA
taaaaaacgcgaaaaacgaaccaaaataaattccgcgcaaactctaaacg

SEQ ID NO: 53033 - DNA, 50 bp, synthetic construct
  source 1..50: mol_type = other DNA
caaaaaatacaaccatctaaaaacccaacaactcaaatccccaaaaccca

SEQ ID NO: 53034 - DNA, 50 bp, synthetic construct
  source 1..50: mol_type = other DNA
caaaaaatacgaccatctaaaaacccaacaactcaaatccccaaaacccg

SEQ ID NO: 53035 - DNA, 50 bp, synthetic construct
  source 1..50: mol_type = other DNA
ataaaacctaatctaaactcacaaccaaaccaactacacctaaaaaacca

SEQ ID NO: 53036 - DNA, 50 bp, synthetic construct
  source 1..50: mol_type = other DNA
ataaaacctaatctaaactcgcaaccaaaccaactacgcctaaaaaaccg

SEQ ID NO: 53037 - DNA, 50 bp, synthetic construct
  source 1..50: mol_type = other DNA
aaaaaaattatctaacaaaactataaacttctcaaaaacaaaaacaatca

SEQ ID NO: 53038 - DNA, 50 bp, synthetic construct
  source 1..50: mol_type = other DNA
aaaaaaattatctaacaaaactataaacttctcgaaaacaaaaacaatcg

SEQ ID NO: 53039 - DNA, 50 bp, synthetic construct
  source 1..50: mol_type = other DNA
aaatctacaaaacaataacacccaaaaaaccacattaaaactttacctca

SEQ ID NO: 53040 - DNA, 50 bp, synthetic construct
  source 1..50: mol_type = other DNA
aaatctacgaaacgataacgcccgaaaaaccacgttaaaactttacctcg

SEQ ID NO: 53041 - DNA, 50 bp, synthetic construct
  source 1..50: mol_type = other DNA
aaaaaacaaaaaccaaaactacaataaacaaaaaacaacatttaaaccca

SEQ ID NO: 53042 - DNA, 50 bp, synthetic construct
  source 1..50: mol_type = other DNA
aaaaaacgaaaaccaaaactacgataaacgaaaaacgacgtttaaacccg

SEQ ID NO: 53043 - DNA, 50 bp, synthetic construct
  source 1..50: mol_type = other DNA
caaactatactctaaactccatttcccaacaaccctaaatatataacaca

SEQ ID NO: 53044 - DNA, 50 bp, synthetic construct
  source 1..50: mol_type = other DNA
cgaactatactctaaactccatttcccgacgaccctaaatatataacgcg

SEQ ID NO: 53045 - DNA, 50 bp, synthetic construct
  source 1..50: mol_type = other DNA
atcaaactatactctaaactccatttcccaacaaccctaaatatataaca

SEQ ID NO: 53046 - DNA, 50 bp, synthetic construct
  source 1..50: mol_type = other DNA
atcgaactatactctaaactccatttcccgacgaccctaaatatataacg

SEQ ID NO: 53047 - DNA, 50 bp, synthetic construct
  source 1..50: mol_type = other DNA
taaaaacaaacaaaataccactcacacaaaacaaaacataaacaaaatca

SEQ ID NO: 53048 - DNA, 50 bp, synthetic construct
  source 1..50: mol_type = other DNA
taaaaacgaacaaaataccgctcgcacgaaacgaaacataaacgaaatcg

SEQ ID NO: 53049 - DNA, 50 bp, synthetic construct
  source 1..50: mol_type = other DNA
ataatataaaaacaaacaaaataccactcacacaaaacaaaacataaaca

SEQ ID NO: 53050 - DNA, 50 bp, synthetic construct
  source 1..50: mol_type = other DNA
gtaatataaaaacgaacaaaataccgctcgcacgaaacgaaacataaacg

SEQ ID NO: 53051 - DNA, 50 bp, synthetic construct
  source 1..50: mol_type = other DNA
aaaaaatctactcaccataatataaaaacaaacaaaataccactcacaca

SEQ ID NO: 53052 - DNA, 50 bp, synthetic construct
  source 1..50: mol_type = other DNA
aaaaaatctactcgccgtaatataaaaacgaacaaaataccgctcgcacg

SEQ ID NO: 53053 - DNA, 50 bp, synthetic construct
  source 1..50: mol_type = other DNA
aaataaaaaatctactcaccataatataaaaacaaacaaaataccactca

SEQ ID NO: 53054 - DNA, 50 bp, synthetic construct
  source 1..50: mol_type = other DNA
aaataaaaaatctactcgccgtaatataaaaacgaacaaaataccgctcg

SEQ ID NO: 53055 - DNA, 50 bp, synthetic construct
  source 1..50: mol_type = other DNA
ccaaaaataaaaaatctactcaccataatataaaaacaaacaaaatacca

SEQ ID NO: 53056 - DNA, 50 bp, synthetic construct
  source 1..50: mol_type = other DNA
ccgaaaataaaaaatctactcgccgtaatataaaaacgaacaaaataccg

SEQ ID NO: 53057 - DNA, 50 bp, synthetic construct
  source 1..50: mol_type = other DNA
ccaaacccaaaaccaaaaataaaaaatctactcaccataatataaaaaca

SEQ ID NO: 53058 - DNA, 50 bp, synthetic construct
  source 1..50: mol_type = other DNA
ccgaacccaaaaccgaaaataaaaaatctactcgccgtaatataaaaacg

SEQ ID NO: 53059 - DNA, 50 bp, synthetic construct
  source 1..50: mol_type = other DNA
ccaaaaaacctaaccaaacccaaaaccaaaaataaaaaatctactcacca

SEQ ID NO: 53060 - DNA, 50 bp, synthetic construct
  source 1..50: mol_type = other DNA
ccaaaaaacctaaccgaacccaaaaccgaaaataaaaaatctactcgccg

SEQ ID NO: 53061 - DNA, 50 bp, synthetic construct
  source 1..50: mol_type = other DNA
aaacccaaaacaaacaaaaacaaaaatatcccaactataaaacataacca

SEQ ID NO: 53062 - DNA, 50 bp, synthetic construct
  source 1..50: mol_type = other DNA
aaacccgaaacgaacgaaaacgaaaatatcccgactataaaacgtaaccg

SEQ ID NO: 53063 - DNA, 50 bp, synthetic construct
  source 1..50: mol_type = other DNA
aataaaaacccataacctaaccaaataaaactactacccaaaaacaaaca

SEQ ID NO: 53064 - DNA, 50 bp, synthetic construct
  source 1..50: mol_type = other DNA
aataaaaacccataacctaaccgaataaaactactacccgaaaacgaacg

SEQ ID NO: 53065 - DNA, 50 bp, synthetic construct
  source 1..50: mol_type = other DNA
ctaaacctctcatccctaaaacacactacataccctccaaaaaaacaaca

SEQ ID NO: 53066 - DNA, 50 bp, synthetic construct
  source 1..50: mol_type = other DNA
ctaaacctctcgtccctaaaacacactacataccctccaaaaaaacaacg

SEQ ID NO: 53067 - DNA, 50 bp, synthetic construct
  source 1..50: mol_type = other DNA
acaatcataacaaataacccaactccaactcacaaacaaaatactacaca

SEQ ID NO: 53068 - DNA, 50 bp, synthetic construct
  source 1..50: mol_type = other DNA
acaatcgtaacaaataacccaactccaactcacgaacgaaatactacacg

SEQ ID NO: 53069 - DNA, 50 bp, synthetic construct
  source 1..50: mol_type = other DNA
taacaaataacccaactccaactcacaaacaaaatactacacacacaaca

SEQ ID NO: 53070 - DNA, 50 bp, synthetic construct
  source 1..50: mol_type = other DNA
taacaaataacccaactccaactcacgaacgaaatactacacgcacaacg

SEQ ID NO: 53071 - DNA, 50 bp, synthetic construct
  source 1..50: mol_type = other DNA
accactataaattcaaaacaaaaaccaacctaacactaaaaatacaaaca

SEQ ID NO: 53072 - DNA, 50 bp, synthetic construct
  source 1..50: mol_type = other DNA
accgctataaattcaaaacgaaaaccaacctaacactaaaaatacgaacg

SEQ ID NO: 53073 - DNA, 50 bp, synthetic construct
  source 1..50: mol_type = other DNA
atattaacccaaaccacaccattataaaaacccctaccatttcacaaaca

SEQ ID NO: 53074 - DNA, 50 bp, synthetic construct
  source 1..50: mol_type = other DNA
atattaacccaaaccgcaccattataaaaacccctaccatttcgcaaacg

SEQ ID NO: 53075 - DNA, 50 bp, synthetic construct
  source 1..50: mol_type = other DNA
ctacctacaaaaacaaataaatcacatataaaacaaaaaaaccccaccca

SEQ ID NO: 53076 - DNA, 50 bp, synthetic construct
  source 1..50: mol_type = other DNA
ctacctacaaaaacaaataaatcacgtataaaacaaaaaaaccccgcccg

SEQ ID NO: 53077 - DNA, 50 bp, synthetic construct
  source 1..50: mol_type = other DNA
ccctacaaataaccaaactaaaaaaccctatactacacctacaaaaacca

SEQ ID NO: 53078 - DNA, 50 bp, synthetic construct
  source 1..50: mol_type = other DNA
ccctacaaataaccgaactaaaaaaccctatactacgcctacgaaaaccg

SEQ ID NO: 53079 - DNA, 50 bp, synthetic construct
  source 1..50: mol_type = other DNA
ctatactacacctacaaaaaccactaaatatactaactataatatatcca

SEQ ID NO: 53080 - DNA, 50 bp, synthetic construct
  source 1..50: mol_type = other DNA
ctatactacgcctacgaaaaccgctaaatatactaactataatatatccg

SEQ ID NO: 53081 - DNA, 50 bp, synthetic construct
  source 1..50: mol_type = other DNA
aaaaaactaactcctaaaaaaacctaacttccatcactccctcaaacaca

SEQ ID NO: 53082 - DNA, 50 bp, synthetic construct
  source 1..50: mol_type = other DNA
aaaaaactaactcctaaaaaaacctaacttccgtcactccctcgaacacg

SEQ ID NO: 53083 - DNA, 50 bp, synthetic construct
  source 1..50: mol_type = other DNA
ctcaaacaccaaattataaaaaaaaaaactttattcaactaaaaacatca

SEQ ID NO: 53084 - DNA, 50 bp, synthetic construct
  source 1..50: mol_type = other DNA
ctcaaacaccgaattataaaaaaaaaaactttattcaactaaaaacatcg

SEQ ID NO: 53085 - DNA, 50 bp, synthetic construct
  source 1..50: mol_type = other DNA
aactaaacacactatatatcaaaaatctatatacactcacatacatatca

SEQ ID NO: 53086 - DNA, 50 bp, synthetic construct
  source 1..50: mol_type = other DNA
aactaaacacgctatatatcgaaaatctatatacgctcacatacgtatcg

SEQ ID NO: 53087 - DNA, 50 bp, synthetic construct
  source 1..50: mol_type = other DNA
atatatcaaaaatctatatacactcacatacatatcaaaatctaaataca

SEQ ID NO: 53088 - DNA, 50 bp, synthetic construct
  source 1..50: mol_type = other DNA
atatatcgaaaatctatatacgctcacatacgtatcgaaatctaaatacg

SEQ ID NO: 53089 - DNA, 50 bp, synthetic construct
  source 1..50: mol_type = other DNA
aatctatatacactcacatacatatcaaaatctaaatacatacacataca

SEQ ID NO: 53090 - DNA, 50 bp, synthetic construct
  source 1..50: mol_type = other DNA
aatctatatacgctcacatacgtatcgaaatctaaatacgtacacatacg

SEQ ID NO: 53091 - DNA, 50 bp, synthetic construct
  source 1..50: mol_type = other DNA
aaatctatatacacatacatatcaaactctactactatctacacactaca

SEQ ID NO: 53092 - DNA, 50 bp, synthetic construct
  source 1..50: mol_type = other DNA
aaatctatatacacatacgtatcgaactctactactatctacgcgctacg

SEQ ID NO: 53093 - DNA, 50 bp, synthetic construct
  source 1..50: mol_type = other DNA
aacacccataactccaaaaaaaaacaaacacaaaacttctaacaataaca

SEQ ID NO: 53094 - DNA, 50 bp, synthetic construct
  source 1..50: mol_type = other DNA
aacgcccataactccaaaaaaaaacgaacacgaaacttctaacgataacg

SEQ ID NO: 53095 - DNA, 50 bp, synthetic construct
  source 1..50: mol_type = other DNA
caaaacctcaaaaacaccccaaccctaattataaaaaaaacccaactaca

SEQ ID NO: 53096 - DNA, 50 bp, synthetic construct
  source 1..50: mol_type = other DNA
caaaacctcgaaaacaccccaaccctaattataaaaaaaacccgactacg

SEQ ID NO: 53097 - DNA, 50 bp, synthetic construct
  source 1..50: mol_type = other DNA
taaaataacacaaccaaactctccccataactaaaactaaaatactccca

SEQ ID NO: 53098 - DNA, 50 bp, synthetic construct
  source 1..50: mol_type = other DNA
taaaataacgcaaccgaactctccccataactaaaactaaaatactcccg

SEQ ID NO: 53099 - DNA, 50 bp, synthetic construct
  source 1..50: mol_type = other DNA
aaaacaaaatcccaaaaacacactaccaaaattcacaaatacaaattcca

SEQ ID NO: 53100 - DNA, 50 bp, synthetic construct
  source 1..50: mol_type = other DNA
aaaacaaaatcccgaaaacgcactaccgaaattcacaaatacgaattccg

SEQ ID NO: 53101 - DNA, 50 bp, synthetic construct
  source 1..50: mol_type = other DNA
cccataactaaaactaaaatactcccaaaactttaaaacaacaaaaccca

SEQ ID NO: 53102 - DNA, 50 bp, synthetic construct
  source 1..50: mol_type = other DNA
cccataactaaaactaaaatactcccgaaactttaaaacgacgaaacccg

SEQ ID NO: 53103 - DNA, 50 bp, synthetic construct
  source 1..50: mol_type = other DNA
acctataaacctcaacaatacatccccaaaactctattctataaaataca

SEQ ID NO: 53104 - DNA, 50 bp, synthetic construct
  source 1..50: mol_type = other DNA
acctataaacctcgacaatacgtccccgaaactctattctataaaatacg

SEQ ID NO: 53105 - DNA, 50 bp, synthetic construct
  source 1..50: mol_type = other DNA
ccaaaactctattctataaaatacactctaaaaaatatataaaaacaaca

SEQ ID NO: 53106 - DNA, 50 bp, synthetic construct
  source 1..50: mol_type = other DNA
ccgaaactctattctataaaatacgctctaaaaaatatataaaaacgacg

SEQ ID NO: 53107 - DNA, 50 bp, synthetic construct
  source 1..50: mol_type = other DNA
aaaatttactacacaaatactatcctaattaattaataacaaataaaaca

SEQ ID NO: 53108 - DNA, 50 bp, synthetic construct
  source 1..50: mol_type = other DNA
aaaatttactacgcaaatactatcctaattaattaataacaaataaaacg

SEQ ID NO: 53109 - DNA, 50 bp, synthetic construct
  source 1..50: mol_type = other DNA
tcccttcccaacaaaaccccaaaaaatcaaataaaaaccctactcttcca

SEQ ID NO: 53110 - DNA, 50 bp, synthetic construct
  source 1..50: mol_type = other DNA
tcccttcccaacgaaaccccaaaaaatcaaataaaaaccctactcttccg

SEQ ID NO: 53111 - DNA, 50 bp, synthetic construct
  source 1..50: mol_type = other DNA
tcaaaaaattcaaaaaattcaaacaacaaaaaaaattcaaatacccatca

SEQ ID NO: 53112 - DNA, 50 bp, synthetic construct
  source 1..50: mol_type = other DNA
tcaaaaaattcgaaaaattcaaacgacaaaaaaaattcgaatacccgtcg

SEQ ID NO: 53113 - DNA, 50 bp, synthetic construct
  source 1..50: mol_type = other DNA
acatcaaaaaattcaaaaaattcaaacaacaaaaaaaattcaaataccca

SEQ ID NO: 53114 - DNA, 50 bp, synthetic construct
  source 1..50: mol_type = other DNA
acatcaaaaaattcgaaaaattcaaacgacaaaaaaaattcgaatacccg

SEQ ID NO: 53115 - DNA, 50 bp, synthetic construct
  source 1..50: mol_type = other DNA
cctcacctacatcaaaaaattcaaaaaattcaaacaacaaaaaaaattca

SEQ ID NO: 53116 - DNA, 50 bp, synthetic construct
  source 1..50: mol_type = other DNA
cctcacctacatcaaaaaattcgaaaaattcaaacgacaaaaaaaattcg

SEQ ID NO: 53117 - DNA, 50 bp, synthetic construct
  source 1..50: mol_type = other DNA
acacatataaaaaaatttccataataaacaaaaaataaaaccctatacca

SEQ ID NO: 53118 - DNA, 50 bp, synthetic construct
  source 1..50: mol_type = other DNA
acgcatataaaaaaatttccataataaacaaaaaataaaaccctataccg

SEQ ID NO: 53119 - DNA, 50 bp, synthetic construct
  source 1..50: mol_type = other DNA
aaaaaactccaaaaaacaaccaacctcaaataacaacccttaaatcacca

SEQ ID NO: 53120 - DNA, 50 bp, synthetic construct
  source 1..50: mol_type = other DNA
aaaaaactccaaaaaacaaccaacctcgaataacgacccttaaatcaccg

SEQ ID NO: 53121 - DNA, 50 bp, synthetic construct
  source 1..50: mol_type = other DNA
caacccaaccctacaataatacaaaaaaaatacaaaataactaccaaaca

SEQ ID NO: 53122 - DNA, 50 bp, synthetic construct
  source 1..50: mol_type = other DNA
cgacccaaccctacgataatacgaaaaaaatacgaaataactaccgaacg

SEQ ID NO: 53123 - DNA, 50 bp, synthetic construct
  source 1..50: mol_type = other DNA
tcttatataaaatttaaaccccaacactcccctccaaaactaaaatccca

SEQ ID NO: 53124 - DNA, 50 bp, synthetic construct
  source 1..50: mol_type = other DNA
tcttatataaaatttaaaccccgacgctcccctccaaaactaaaatcccg

SEQ ID NO: 53125 - DNA, 50 bp, synthetic construct
  source 1..50: mol_type = other DNA
caattattaaaacataaaaaaaactaataactcaacttaacaccaccaca

SEQ ID NO: 53126 - DNA, 50 bp, synthetic construct
  source 1..50: mol_type = other DNA
caattattaaaacgtaaaaaaaactaataactcaacttaacaccaccgcg

SEQ ID NO: 53127 - DNA, 50 bp, synthetic construct
  source 1..50: mol_type = other DNA
aataatatcacattcaataaacaaactaaccaaattcctcccttctccca

SEQ ID NO: 53128 - DNA, 50 bp, synthetic construct
  source 1..50: mol_type = other DNA
aataatatcacgttcaataaacgaactaaccaaattcctcccttctcccg

SEQ ID NO: 53129 - DNA, 50 bp, synthetic construct
  source 1..50: mol_type = other DNA
acacaaaatatcaccacataaaccaaaataatctcaatctcctaacctca

SEQ ID NO: 53130 - DNA, 50 bp, synthetic construct
  source 1..50: mol_type = other DNA
acacaaaatatcaccgcgtaaaccaaaataatctcgatctcctaacctcg

SEQ ID NO: 53131 - DNA, 50 bp, synthetic construct
  source 1..50: mol_type = other DNA
cctcaactaaacacctaaaaaaacctaaaaacaactccttttttcttcca

SEQ ID NO: 53132 - DNA, 50 bp, synthetic construct
  source 1..50: mol_type = other DNA
cctcgactaaacgcctaaaaaaacctaaaaacaactccttttttcttccg

SEQ ID NO: 53133 - DNA, 50 bp, synthetic construct
  source 1..50: mol_type = other DNA
aactcaaacacctttacccaatttaatttcaatttaaaccaaaatcccca

SEQ ID NO: 53134 - DNA, 50 bp, synthetic construct
  source 1..50: mol_type = other DNA
aactcgaacgcctttacccgatttaatttcaatttaaaccaaaatccccg

SEQ ID NO: 53135 - DNA, 50 bp, synthetic construct
  source 1..50: mol_type = other DNA
aaaactaccaaactactaatactaaaattcaaacccccacacataaccca

SEQ ID NO: 53136 - DNA, 50 bp, synthetic construct
  source 1..50: mol_type = other DNA
aaaactaccgaactactaatactaaaattcaaacccccgcacataacccg

SEQ ID NO: 53137 - DNA, 50 bp, synthetic construct
  source 1..50: mol_type = other DNA
caaataaaaaaacaaacacacccttctccacataacaacaaaaaatacca

SEQ ID NO: 53138 - DNA, 50 bp, synthetic construct
  source 1..50: mol_type = other DNA
caaataaaaaaacaaacacacccttctccacgtaacaacaaaaaataccg

SEQ ID NO: 53139 - DNA, 50 bp, synthetic construct
  source 1..50: mol_type = other DNA
tttccaaaacaaaccaaaacatcacaacaattttcaaaaacaactaatca

SEQ ID NO: 53140 - DNA, 50 bp, synthetic construct
  source 1..50: mol_type = other DNA
tttccgaaacgaaccgaaacatcgcgacaattttcaaaaacaactaatcg

SEQ ID NO: 53141 - DNA, 50 bp, synthetic construct
  source 1..50: mol_type = other DNA
ccaaaattaccaaaaaaatcccaaaatttccaaaacaaaccaaaacatca

SEQ ID NO: 53142 - DNA, 50 bp, synthetic construct
  source 1..50: mol_type = other DNA
ccaaaattaccgaaaaaatcccaaaatttccgaaacgaaccgaaacatcg

SEQ ID NO: 53143 - DNA, 50 bp, synthetic construct
  source 1..50: mol_type = other DNA
caaataaccaaaaaaatcccaaaattaccaaaaaaatcccaaaatttcca

SEQ ID NO: 53144 - DNA, 50 bp, synthetic construct
  source 1..50: mol_type = other DNA
cgaataaccgaaaaaatcccaaaattaccgaaaaaatcccaaaatttccg

SEQ ID NO: 53145 - DNA, 50 bp, synthetic construct
  source 1..50: mol_type = other DNA
atatccaaaataaacacattcaaataaccaaaaaaatcccaaaattacca

SEQ ID NO: 53146 - DNA, 50 bp, synthetic construct
  source 1..50: mol_type = other DNA
atatccgaaataaacgcattcgaataaccgaaaaaatcccaaaattaccg

SEQ ID NO: 53147 - DNA, 50 bp, synthetic construct
  source 1..50: mol_type = other DNA
taaccacttacaaaccaaaaatatccaaaataaacacattcaaataacca

SEQ ID NO: 53148 - DNA, 50 bp, synthetic construct
  source 1..50: mol_type = other DNA
taaccacttacaaaccgaaaatatccgaaataaacgcattcgaataaccg

SEQ ID NO: 53149 - DNA, 50 bp, synthetic construct
  source 1..50: mol_type = other DNA
aaaaaccaaaaaattaaaaaacataaccacttacaaaccaaaaatatcca

SEQ ID NO: 53150 - DNA, 50 bp, synthetic construct
  source 1..50: mol_type = other DNA
aaaaaccgaaaaattaaaaaacgtaaccacttacaaaccgaaaatatccg

SEQ ID NO: 53151 - DNA, 50 bp, synthetic construct
  source 1..50: mol_type = other DNA
tcaaacttcaaaaaaccaaaaaattaaaaaacataaccacttacaaacca

SEQ ID NO: 53152 - DNA, 50 bp, synthetic construct
  source 1..50: mol_type = other DNA
tcaaacttcaaaaaaccgaaaaattaaaaaacgtaaccacttacaaaccg

SEQ ID NO: 53153 - DNA, 50 bp, synthetic construct
  source 1..50: mol_type = other DNA
tcaaaaaaaaccacttactaaacattaccaaacatatacaaaaataacca

SEQ ID NO: 53154 - DNA, 50 bp, synthetic construct
  source 1..50: mol_type = other DNA
tcgaaaaaaaccacttactaaacgttaccgaacgtatacgaaaataaccg

SEQ ID NO: 53155 - DNA, 50 bp, synthetic construct
  source 1..50: mol_type = other DNA
ccaaaaaaccaaaaaatcaaaaaaaaccacttactaaacattaccaaaca

SEQ ID NO: 53156 - DNA, 50 bp, synthetic construct
  source 1..50: mol_type = other DNA
ccgaaaaaccaaaaaatcgaaaaaaaccacttactaaacgttaccgaacg

SEQ ID NO: 53157 - DNA, 50 bp, synthetic construct
  source 1..50: mol_type = other DNA
ccaaaaatttccaaaaaaccaaaaaatcaaaaaaaaccacttactaaaca

SEQ ID NO: 53158 - DNA, 50 bp, synthetic construct
  source 1..50: mol_type = other DNA
ccgaaaatttccgaaaaaccaaaaaatcgaaaaaaaccacttactaaacg

SEQ ID NO: 53159 - DNA, 50 bp, synthetic construct
  source 1..50: mol_type = other DNA
caaaaccaactacaaaaatcaccaaaaatttccaaaaaaccaaaaaatca

SEQ ID NO: 53160 - DNA, 50 bp, synthetic construct
  source 1..50: mol_type = other DNA
caaaaccgactacgaaaatcaccgaaaatttccgaaaaaccaaaaaatcg

SEQ ID NO: 53161 - DNA, 50 bp, synthetic construct
  source 1..50: mol_type = other DNA
ctaaaaaataaacccccaaaaccaactacaaaaatcaccaaaaatttcca

SEQ ID NO: 53162 - DNA, 50 bp, synthetic construct
  source 1..50: mol_type = other DNA
ctaaaaaataaacccccaaaaccgactacgaaaatcaccgaaaatttccg

SEQ ID NO: 53163 - DNA, 50 bp, synthetic construct
  source 1..50: mol_type = other DNA
aaaatacaactatcccaaaaaaaacttctaaaaaaaacaaaacacatcca

SEQ ID NO: 53164 - DNA, 50 bp, synthetic construct
  source 1..50: mol_type = other DNA
aaaatacaactatcccgaaaaaaacttctaaaaaaaacaaaacgcgtccg

SEQ ID NO: 53165 - DNA, 50 bp, synthetic construct
  source 1..50: mol_type = other DNA
tccataaaaaaataaacaactccaataaatatacacaaatatctcactca

SEQ ID NO: 53166 - DNA, 50 bp, synthetic construct
  source 1..50: mol_type = other DNA
tccataaaaaaataaacgactccaataaatatacgcgaatatctcactcg

SEQ ID NO: 53167 - DNA, 50 bp, synthetic construct
  source 1..50: mol_type = other DNA
aaaaaatttatccaacaacaacaacattaaaaactccaacaaaaaataca

SEQ ID NO: 53168 - DNA, 50 bp, synthetic construct
  source 1..50: mol_type = other DNA
gaaaaatttatccgacgacaacgacgttaaaaactccgacgaaaaatacg

SEQ ID NO: 53169 - DNA, 50 bp, synthetic construct
  source 1..50: mol_type = other DNA
aaccaaaacaaccctaaaaaaaccaaaaaacacacactcttaaaaaaaca

SEQ ID NO: 53170 - DNA, 50 bp, synthetic construct
  source 1..50: mol_type = other DNA
gaccgaaacgaccctaaaaaaaccaaaaaacgcgcactcttaaaaaaacg

SEQ ID NO: 53171 - DNA, 50 bp, synthetic construct
  source 1..50: mol_type = other DNA
aaaactatcaaatcaaaacacccaaaaaaatacctaaacccaaataaaca

SEQ ID NO: 53172 - DNA, 50 bp, synthetic construct
  source 1..50: mol_type = other DNA
aaaactatcgaatcaaaacgcccgaaaaaatacctaaacccgaataaacg

SEQ ID NO: 53173 - DNA, 50 bp, synthetic construct
  source 1..50: mol_type = other DNA
acttacctaaaactatcaaatcaaaacacccaaaaaaatacctaaaccca

SEQ ID NO: 53174 - DNA, 50 bp, synthetic construct
  source 1..50: mol_type = other DNA
acttacctaaaactatcgaatcaaaacgcccgaaaaaatacctaaacccg

SEQ ID NO: 53175 - DNA, 50 bp, synthetic construct
  source 1..50: mol_type = other DNA
caaaccaaaaacaactacacttacctaaaactatcaaatcaaaacaccca

SEQ ID NO: 53176 - DNA, 50 bp, synthetic construct
  source 1..50: mol_type = other DNA
caaaccaaaaacaactacacttacctaaaactatcgaatcaaaacgcccg

SEQ ID NO: 53177 - DNA, 50 bp, synthetic construct
  source 1..50: mol_type = other DNA
acacaaaaaaccaaaaatacacaattctcctcaaaactccttcctctcca

SEQ ID NO: 53178 - DNA, 50 bp, synthetic construct
  source 1..50: mol_type = other DNA
acacaaaaaaccaaaaatacacgattctcctcgaaactccttcctctccg

SEQ ID NO: 53179 - DNA, 50 bp, synthetic construct
  source 1..50: mol_type = other DNA
cctcactacaaatctataaacaaaacaaaaaatacttccttaaccaaaca

SEQ ID NO: 53180 - DNA, 50 bp, synthetic construct
  source 1..50: mol_type = other DNA
cctcgctacgaatctataaacgaaacgaaaaatacttccttaaccaaacg

SEQ ID NO: 53181 - DNA, 50 bp, synthetic construct
  source 1..50: mol_type = other DNA
tgtaagaaaatgtggattttattatatattgtagaagaatatgttttggt

SEQ ID NO: 53182 - DNA, 50 bp, synthetic construct
  source 1..50: mol_type = other DNA
tgtaagaaaatgtggattttattatatattgtagaagaatatgttttggc

SEQ ID NO: 53183 - DNA, 50 bp, synthetic construct
  source 1..50: mol_type = other DNA
aatataacaaccatctttatacaaacaaaaaatctcaacacaaattccca

SEQ ID NO: 53184 - DNA, 50 bp, synthetic construct
  source 1..50: mol_type = other DNA
aatataacaaccatctttatacaaacgaaaaatctcgacgcgaattcccg

SEQ ID NO: 53185 - DNA, 50 bp, synthetic construct
  source 1..50: mol_type = other DNA
aaacatccacctattttcctaccacccaaaactacacttctatctattca

SEQ ID NO: 53186 - DNA, 50 bp, synthetic construct
  source 1..50: mol_type = other DNA
aaacatccacctattttcctaccgcccaaaactacacttctatctattcg

SEQ ID NO: 53187 - DNA, 50 bp, synthetic construct
  source 1..50: mol_type = other DNA
ataaaacacattattcaaaaacatttaaaaactaaatataataactcaca

SEQ ID NO: 53188 - DNA, 50 bp, synthetic construct
  source 1..50: mol_type = other DNA
ataaaacacgttattcaaaaacatttaaaaactaaatataataactcacg

SEQ ID NO: 53189 - DNA, 50 bp, synthetic construct
  source 1..50: mol_type = other DNA
tataaaaattagttaggtgtggtggtatatgtttgtgattttagttgttt

SEQ ID NO: 53190 - DNA, 50 bp, synthetic construct
  source 1..50: mol_type = other DNA
tataaaaattagttaggcgtggtggtatatgtttgtgattttagttgttc

SEQ ID NO: 53191 - DNA, 50 bp, synthetic construct
  source 1..50: mol_type = other DNA
aatcaaataaatacaacacacattaaaaaataaaaccctaactaaacaca

SEQ ID NO: 53192 - DNA, 50 bp, synthetic construct
  source 1..50: mol_type = other DNA
aatcaaataaatacaacacacgttaaaaaataaaaccctaactaaacgcg

SEQ ID NO: 53193 - DNA, 50 bp, synthetic construct
  source 1..50: mol_type = other DNA
cttaatactatcaattaaaattaaaaataatcaaataaatacaacacaca

SEQ ID NO: 53194 - DNA, 50 bp, synthetic construct
  source 1..50: mol_type = other DNA
cttaatactatcaattaaaattaaaaataatcaaataaatacaacacacg

SEQ ID NO: 53195 - DNA, 50 bp, synthetic construct
  source 1..50: mol_type = other DNA
cttaattatatacttaaattcttcaaaaaactaaatatataaaacccaca

SEQ ID NO: 53196 - DNA, 50 bp, synthetic construct
  source 1..50: mol_type = other DNA
cttaattatatacttaaattcttcgaaaaactaaatatataaaacccacg

SEQ ID NO: 53197 - DNA, 50 bp, synthetic construct
  source 1..50: mol_type = other DNA
catatctataaacaaaaaacaaccaaaaacatattctcctaacctcacca

SEQ ID NO: 53198 - DNA, 50 bp, synthetic construct
  source 1..50: mol_type = other DNA
catatctataaacgaaaaacaaccgaaaacgtattctcctaacctcgccg

SEQ ID NO: 53199 - DNA, 50 bp, synthetic construct
  source 1..50: mol_type = other DNA
aactccattttcatccaaaaaaacaacaaaatcaaaaaaacacatcccca

SEQ ID NO: 53200 - DNA, 50 bp, synthetic construct
  source 1..50: mol_type = other DNA
gactccattttcatccaaaaaaacgacgaaatcaaaaaaacacgtccccg

SEQ ID NO: 53201 - DNA, 50 bp, synthetic construct
  source 1..50: mol_type = other DNA
tcttacactccaaaatccacaaaaaaaaccaaaaaaccaacacaaaatca

SEQ ID NO: 53202 - DNA, 50 bp, synthetic construct
  source 1..50: mol_type = other DNA
tcttacactccaaaatccacaaaaaaaaccgaaaaaccgacgcgaaatcg

SEQ ID NO: 53203 - DNA, 50 bp, synthetic construct
  source 1..50: mol_type = other DNA
aactaatcttacactccaaaatccacaaaaaaaaccaaaaaaccaacaca

SEQ ID NO: 53204 - DNA, 50 bp, synthetic construct
  source 1..50: mol_type = other DNA
aactaatcttacactccaaaatccacaaaaaaaaccgaaaaaccgacgcg

SEQ ID NO: 53205 - DNA, 50 bp, synthetic construct
  source 1..50: mol_type = other DNA
ccaactaatcttacactccaaaatccacaaaaaaaaccaaaaaaccaaca

SEQ ID NO: 53206 - DNA, 50 bp, synthetic construct
  source 1..50: mol_type = other DNA
ccaactaatcttacactccaaaatccacaaaaaaaaccgaaaaaccgacg

SEQ ID NO: 53207 - DNA, 50 bp, synthetic construct
  source 1..50: mol_type = other DNA
attattagttggttttgtattttagggtttataagaaggattggagggtt

SEQ ID NO: 53208 - DNA, 50 bp, synthetic construct
  source 1..50: mol_type = other DNA
attattagttggttttgtattttagggtttataagaaggatcggagggtc

SEQ ID NO: 53209 - DNA, 50 bp, synthetic construct
  source 1..50: mol_type = other DNA
aaaaaataaccaaaaaaccaaaaccacaaataaaaaaaacacacccccca

SEQ ID NO: 53210 - DNA, 50 bp, synthetic construct
  source 1..50: mol_type = other DNA
aaaaaataaccgaaaaaccgaaaccgcaaataaaaaaaacgcgccccccg

SEQ ID NO: 53211 - DNA, 50 bp, synthetic construct
  source 1..50: mol_type = other DNA
ccacacaaaaaaataaccaaaaaaccaaaaccacaaataaaaaaaacaca

SEQ ID NO: 53212 - DNA, 50 bp, synthetic construct
  source 1..50: mol_type = other DNA
ccgcgcgaaaaaataaccgaaaaaccgaaaccgcaaataaaaaaaacgcg

SEQ ID NO: 53213 - DNA, 50 bp, synthetic construct
  source 1..50: mol_type = other DNA
caccacacaaaaaaataaccaaaaaaccaaaaccacaaataaaaaaaaca

SEQ ID NO: 53214 - DNA, 50 bp, synthetic construct
  source 1..50: mol_type = other DNA
cgccgcgcgaaaaaataaccgaaaaaccgaaaccgcaaataaaaaaaacg

SEQ ID NO: 53215 - DNA, 50 bp, synthetic construct
  source 1..50: mol_type = other DNA
caaaaaatataaaaaccaaactcacctcaaacacaaaactaaaataaaca

SEQ ID NO: 53216 - DNA, 50 bp, synthetic construct
  source 1..50: mol_type = other DNA
cgaaaaatataaaaaccgaactcacctcgaacgcgaaactaaaataaacg

SEQ ID NO: 53217 - DNA, 50 bp, synthetic construct
  source 1..50: mol_type = other DNA
aatataaaaaccaaactcacctcaaacacaaaactaaaataaacaaaaca

SEQ ID NO: 53218 - DNA, 50 bp, synthetic construct
  source 1..50: mol_type = other DNA
aatataaaaaccgaactcacctcgaacgcgaaactaaaataaacgaaacg

SEQ ID NO: 53219 - DNA, 50 bp, synthetic construct
  source 1..50: mol_type = other DNA
aaccaaactcacctcaaacacaaaactaaaataaacaaaacaaaaataca

SEQ ID NO: 53220 - DNA, 50 bp, synthetic construct
  source 1..50: mol_type = other DNA
aaccgaactcacctcgaacgcgaaactaaaataaacgaaacgaaaatacg

SEQ ID NO: 53221 - DNA, 50 bp, synthetic construct
  source 1..50: mol_type = other DNA
aacacaaaactaaaataaacaaaacaaaaatacacacaaaaacaaaaaca

SEQ ID NO: 53222 - DNA, 50 bp, synthetic construct
  source 1..50: mol_type = other DNA
aacgcgaaactaaaataaacgaaacgaaaatacgcacgaaaacaaaaacg

SEQ ID NO: 53223 - DNA, 50 bp, synthetic construct
  source 1..50: mol_type = other DNA
aaactaaaataaacaaaacaaaaatacacacaaaaacaaaaacacaaaca

SEQ ID NO: 53224 - DNA, 50 bp, synthetic construct
  source 1..50: mol_type = other DNA
aaactaaaataaacgaaacgaaaatacgcacgaaaacaaaaacgcgaacg

SEQ ID NO: 53225 - DNA, 50 bp, synthetic construct
  source 1..50: mol_type = other DNA
aatataaaacataaccaaacaaccaataaaaacaaaaaacaaaacaacca

SEQ ID NO: 53226 - DNA, 50 bp, synthetic construct
  source 1..50: mol_type = other DNA
gatataaaacgtaaccgaacgaccgataaaaacaaaaaacgaaacgaccg

SEQ ID NO: 53227 - DNA, 50 bp, synthetic construct
  source 1..50: mol_type = other DNA
aaccaaaacaatataaaacataaccaaacaaccaataaaaacaaaaaaca

SEQ ID NO: 53228 - DNA, 50 bp, synthetic construct
  source 1..50: mol_type = other DNA
aaccgaaacgatataaaacgtaaccgaacgaccgataaaaacaaaaaacg

SEQ ID NO: 53229 - DNA, 50 bp, synthetic construct
  source 1..50: mol_type = other DNA
tcacataaacactaaaacaaaaccaaaacaatataaaacataaccaaaca

SEQ ID NO: 53230 - DNA, 50 bp, synthetic construct
  source 1..50: mol_type = other DNA
tcacgtaaacgctaaaacgaaaccgaaacgatataaaacgtaaccgaacg

SEQ ID NO: 53231 - DNA, 50 bp, synthetic construct
  source 1..50: mol_type = other DNA
ctaatcacataaacactaaaacaaaaccaaaacaatataaaacataacca

SEQ ID NO: 53232 - DNA, 50 bp, synthetic construct
  source 1..50: mol_type = other DNA
ctaatcacgtaaacgctaaaacgaaaccgaaacgatataaaacgtaaccg

SEQ ID NO: 53233 - DNA, 50 bp, synthetic construct
  source 1..50: mol_type = other DNA
cctatactaatcacataaacactaaaacaaaaccaaaacaatataaaaca

SEQ ID NO: 53234 - DNA, 50 bp, synthetic construct
  source 1..50: mol_type = other DNA
cctatactaatcacgtaaacgctaaaacgaaaccgaaacgatataaaacg

SEQ ID NO: 53235 - DNA, 50 bp, synthetic construct
  source 1..50: mol_type = other DNA
aaaaaacaaaacaaaaacacacctatactaatcacataaacactaaaaca

SEQ ID NO: 53236 - DNA, 50 bp, synthetic construct
  source 1..50: mol_type = other DNA
gaaaaacgaaacaaaaacgcgcctatactaatcacgtaaacgctaaaacg

SEQ ID NO: 53237 - DNA, 50 bp, synthetic construct
  source 1..50: mol_type = other DNA
tcaacaacaaaaaacaaaacaaaaacacacctatactaatcacataaaca

SEQ ID NO: 53238 - DNA, 50 bp, synthetic construct
  source 1..50: mol_type = other DNA
tcgacgacgaaaaacgaaacaaaaacgcgcctatactaatcacgtaaacg

SEQ ID NO: 53239 - DNA, 50 bp, synthetic construct
  source 1..50: mol_type = other DNA
acaaaatcaacaacaaaaaacaaaacaaaaacacacctatactaatcaca

SEQ ID NO: 53240 - DNA, 50 bp, synthetic construct
  source 1..50: mol_type = other DNA
acgaaatcgacgacgaaaaacgaaacaaaaacgcgcctatactaatcacg

SEQ ID NO: 53241 - DNA, 50 bp, synthetic construct
  source 1..50: mol_type = other DNA
accaaaccaaaatccaaactcccattaacaaatataaaaaaaacaaacca

SEQ ID NO: 53242 - DNA, 50 bp, synthetic construct
  source 1..50: mol_type = other DNA
accaaaccaaaatccaaactcccgttaacaaatataaaaaaaacgaaccg

SEQ ID NO: 53243 - DNA, 50 bp, synthetic construct
  source 1..50: mol_type = other DNA
ttactccccaaaccaaaactcaaaaaaattcaaaaacaaaacaacaaaca

SEQ ID NO: 53244 - DNA, 50 bp, synthetic construct
  source 1..50: mol_type = other DNA
ttactccccaaaccgaaactcgaaaaaattcgaaaacgaaacgacgaacg

SEQ ID NO: 53245 - DNA, 50 bp, synthetic construct
  source 1..50: mol_type = other DNA
aactcattaatctaaaaatataattctcaatttaaatccaaaaaatccca

SEQ ID NO: 53246 - DNA, 50 bp, synthetic construct
  source 1..50: mol_type = other DNA
aactcgttaatctaaaaatataattctcgatttaaatccgaaaaatcccg

SEQ ID NO: 53247 - DNA, 50 bp, synthetic construct
  source 1..50: mol_type = other DNA
caacaaaccacaaaatcctaaacaacaaaaaacccctaaaaaaaactcca

SEQ ID NO: 53248 - DNA, 50 bp, synthetic construct
  source 1..50: mol_type = other DNA
cgacgaaccacaaaatcctaaacaacaaaaaacccctaaaaaaaactccg

SEQ ID NO: 53249 - DNA, 50 bp, synthetic construct
  source 1..50: mol_type = other DNA
acaaaaacaaaactaacaacaaacaaaaaacaaaacactaaacaaaaaca

SEQ ID NO: 53250 - DNA, 50 bp, synthetic construct
  source 1..50: mol_type = other DNA
acgaaaacaaaactaacaacaaacaaaaaacgaaacactaaacgaaaacg

SEQ ID NO: 53251 - DNA, 50 bp, synthetic construct
  source 1..50: mol_type = other DNA
aaaataaaactcaacaaaaaaatccacaaaacacacctaaccacactaca

SEQ ID NO: 53252 - DNA, 50 bp, synthetic construct
  source 1..50: mol_type = other DNA
aaaataaaactcaacaaaaaaatccgcgaaacacacctaaccgcactacg

SEQ ID NO: 53253 - DNA, 50 bp, synthetic construct
  source 1..50: mol_type = other DNA
cctaacaactaaaattattattctcctccaacaccttatacaacacctca

SEQ ID NO: 53254 - DNA, 50 bp, synthetic construct
  source 1..50: mol_type = other DNA
cctaacgactaaaattattattctcctccaacgccttatacaacacctcg

SEQ ID NO: 53255 - DNA, 50 bp, synthetic construct
  source 1..50: mol_type = other DNA
taacaactaaaattattattctcctccaacaccttatacaacacctcaca

SEQ ID NO: 53256 - DNA, 50 bp, synthetic construct
  source 1..50: mol_type = other DNA
taacgactaaaattattattctcctccaacgccttatacaacacctcgcg

SEQ ID NO: 53257 - DNA, 50 bp, synthetic construct
  source 1..50: mol_type = other DNA
aacacaaaaaacacaaatactaaaacaactaacaaaacaacacaaacaca

SEQ ID NO: 53258 - DNA, 50 bp, synthetic construct
  source 1..50: mol_type = other DNA
aacgcaaaaaacgcaaatactaaaacaactaacgaaacgacgcgaacacg

SEQ ID NO: 53259 - DNA, 50 bp, synthetic construct
  source 1..50: mol_type = other DNA
cacccaccaaaacctaaacaaataaaaacaccaaataaaacaaacaaaca

SEQ ID NO: 53260 - DNA, 50 bp, synthetic construct
  source 1..50: mol_type = other DNA
cgcccaccgaaacctaaacaaataaaaacgccaaataaaacgaacgaacg

SEQ ID NO: 53261 - DNA, 50 bp, synthetic construct
  source 1..50: mol_type = other DNA
aaaccctcacctaccatccaacctataatcaaaacaaaaccaaaaaatca

SEQ ID NO: 53262 - DNA, 50 bp, synthetic construct
  source 1..50: mol_type = other DNA
aaaccctcgcctaccatccgacctataatcgaaacaaaaccaaaaaatcg

SEQ ID NO: 53263 - DNA, 50 bp, synthetic construct
  source 1..50: mol_type = other DNA
caaaaaaaacaaaaccctctaatctccaaaaaatttaaaaatcacaatca

SEQ ID NO: 53264 - DNA, 50 bp, synthetic construct
  source 1..50: mol_type = other DNA
cgaaaaaaacgaaaccctctaatctccgaaaaatttaaaaatcgcaatcg

SEQ ID NO: 53265 - DNA, 50 bp, synthetic construct
  source 1..50: mol_type = other DNA
accccacaacacaaaaaacaataacttttctaaccaaaacaaataacaca

SEQ ID NO: 53266 - DNA, 50 bp, synthetic construct
  source 1..50: mol_type = other DNA
accccgcgacgcaaaaaacaataacttttctaaccaaaacaaataacgcg

SEQ ID NO: 53267 - DNA, 50 bp, synthetic construct
  source 1..50: mol_type = other DNA
aacacaaaaaacaataacttttctaaccaaaacaaataacacaaacatca

SEQ ID NO: 53268 - DNA, 50 bp, synthetic construct
  source 1..50: mol_type = other DNA
gacgcaaaaaacaataacttttctaaccaaaacaaataacgcgaacgtcg

SEQ ID NO: 53269 - DNA, 50 bp, synthetic construct
  source 1..50: mol_type = other DNA
acttttctaaccaaaacaaataacacaaacatcacaaaaaataatcccca

SEQ ID NO: 53270 - DNA, 50 bp, synthetic construct
  source 1..50: mol_type = other DNA
acttttctaaccaaaacaaataacgcgaacgtcgcaaaaaataatccccg

SEQ ID NO: 53271 - DNA, 50 bp, synthetic construct
  source 1..50: mol_type = other DNA
ctaaccaaaacaaataacacaaacatcacaaaaaataatccccaaaacca

SEQ ID NO: 53272 - DNA, 50 bp, synthetic construct
  source 1..50: mol_type = other DNA
ctaaccaaaacaaataacgcgaacgtcgcaaaaaataatccccgaaaccg

SEQ ID NO: 53273 - DNA, 50 bp, synthetic construct
  source 1..50: mol_type = other DNA
taaccaacaccatttccaataaactccaaaaccacaaactttataaaaca

SEQ ID NO: 53274 - DNA, 50 bp, synthetic construct
  source 1..50: mol_type = other DNA
taaccaacaccatttccgataaactccgaaaccacgaactttataaaacg

SEQ ID NO: 53275 - DNA, 50 bp, synthetic construct
  source 1..50: mol_type = other DNA
acccataaccccaaaacctaccaaaaataatactaaccataatactaaca

SEQ ID NO: 53276 - DNA, 50 bp, synthetic construct
  source 1..50: mol_type = other DNA
acccgtaaccccgaaacctaccgaaaataatactaaccataatactaacg

SEQ ID NO: 53277 - DNA, 50 bp, synthetic construct
  source 1..50: mol_type = other DNA
cataaccccaaaacctaccaaaaataatactaaccataatactaacaaca

SEQ ID NO: 53278 - DNA, 50 bp, synthetic construct
  source 1..50: mol_type = other DNA
cgtaaccccgaaacctaccgaaaataatactaaccataatactaacgacg

SEQ ID NO: 53279 - DNA, 50 bp, synthetic construct
  source 1..50: mol_type = other DNA
acctaccaaaaataatactaaccataatactaacaacaattaaacctaca

SEQ ID NO: 53280 - DNA, 50 bp, synthetic construct
  source 1..50: mol_type = other DNA
acctaccgaaaataatactaaccataatactaacgacgattaaacctacg

SEQ ID NO: 53281 - DNA, 50 bp, synthetic construct
  source 1..50: mol_type = other DNA
actaacaacaattaaacctacaaaaactaaaaaaacacaaataacaacca

SEQ ID NO: 53282 - DNA, 50 bp, synthetic construct
  source 1..50: mol_type = other DNA
actaacgacgattaaacctacgaaaactaaaaaaacgcaaataacgaccg

SEQ ID NO: 53283 - DNA, 50 bp, synthetic construct
  source 1..50: mol_type = other DNA
taaacctacaaaaactaaaaaaacacaaataacaaccaaaactacaaaca

SEQ ID NO: 53284 - DNA, 50 bp, synthetic construct
  source 1..50: mol_type = other DNA
taaacctacgaaaactaaaaaaacgcaaataacgaccgaaactacaaacg

SEQ ID NO: 53285 - DNA, 50 bp, synthetic construct
  source 1..50: mol_type = other DNA
ccaaaaaaacaaatcccacccataaaataaaaccacaaaactcttcacca

SEQ ID NO: 53286 - DNA, 50 bp, synthetic construct
  source 1..50: mol_type = other DNA
ccgaaaaaacaaatcccacccataaaataaaaccgcaaaactcttcgccg

SEQ ID NO: 53287 - DNA, 50 bp, synthetic construct
  source 1..50: mol_type = other DNA
caacacccaacactaactaacaacaaaactaactccaaaaacaaaaccca

SEQ ID NO: 53288 - DNA, 50 bp, synthetic construct
  source 1..50: mol_type = other DNA
caacacccgacactaactaacaacaaaactaactccaaaaacgaaacccg

SEQ ID NO: 53289 - DNA, 50 bp, synthetic construct
  source 1..50: mol_type = other DNA
aaatccccaacacccaacactaactaacaacaaaactaactccaaaaaca

SEQ ID NO: 53290 - DNA, 50 bp, synthetic construct
  source 1..50: mol_type = other DNA
aaatccccaacacccgacactaactaacaacaaaactaactccaaaaacg

SEQ ID NO: 53291 - DNA, 50 bp, synthetic construct
  source 1..50: mol_type = other DNA
aaacccaccaaaaccactacaaaacaataaaccaaacaaaaactaaaaca

SEQ ID NO: 53292 - DNA, 50 bp, synthetic construct
  source 1..50: mol_type = other DNA
aaacccgccgaaaccactacgaaacaataaaccgaacaaaaactaaaacg

SEQ ID NO: 53293 - DNA, 50 bp, synthetic construct
  source 1..50: mol_type = other DNA
ctactcaaatataaaccaaccactttcctaaaaatttaaaaacaactaca

SEQ ID NO: 53294 - DNA, 50 bp, synthetic construct
  source 1..50: mol_type = other DNA
ctactcgaatataaaccgaccgctttcctaaaaatttaaaaacgactacg

SEQ ID NO: 53295 - DNA, 50 bp, synthetic construct
  source 1..50: mol_type = other DNA
aaaccaaatcctaaacaaaacacaaccattttcaaattttcaaaaaaaca

SEQ ID NO: 53296 - DNA, 50 bp, synthetic construct
  source 1..50: mol_type = other DNA
aaaccgaatcctaaacaaaacgcaaccgttttcaaattttcaaaaaaacg

SEQ ID NO: 53297 - DNA, 50 bp, synthetic construct
  source 1..50: mol_type = other DNA
caaatcctaaacaaaacacaaccattttcaaattttcaaaaaaacaatca

SEQ ID NO: 53298 - DNA, 50 bp, synthetic construct
  source 1..50: mol_type = other DNA
cgaatcctaaacaaaacgcaaccgttttcaaattttcaaaaaaacgatcg

SEQ ID NO: 53299 - DNA, 50 bp, synthetic construct
  source 1..50: mol_type = other DNA
aaacccatacaactctccaaacaataataataactcaacctaaaaaaaca

SEQ ID NO: 53300 - DNA, 50 bp, synthetic construct
  source 1..50: mol_type = other DNA
aaacccgtacaactctccgaacaataataataactcgacctaaaaaaacg

SEQ ID NO: 53301 - DNA, 50 bp, synthetic construct
  source 1..50: mol_type = other DNA
aaacaataaaaataaaattcactaaccaacaaaaccaaacacaaaacaca

SEQ ID NO: 53302 - DNA, 50 bp, synthetic construct
  source 1..50: mol_type = other DNA
aaacgataaaaataaaattcactaaccaacgaaaccgaacacaaaacgcg

SEQ ID NO: 53303 - DNA, 50 bp, synthetic construct
  source 1..50: mol_type = other DNA
aaaaataaaattcactaaccaacaaaaccaaacacaaaacacacaaaaca

SEQ ID NO: 53304 - DNA, 50 bp, synthetic construct
  source 1..50: mol_type = other DNA
aaaaataaaattcactaaccaacgaaaccgaacacaaaacgcgcaaaacg

SEQ ID NO: 53305 - DNA, 50 bp, synthetic construct
  source 1..50: mol_type = other DNA
aaaacaccatataaacctaaaaaaaccaaaaaacaaacaaaccccctcca

SEQ ID NO: 53306 - DNA, 50 bp, synthetic construct
  source 1..50: mol_type = other DNA
aaaacgccgtataaacctaaaaaaaccgaaaaacaaacgaaccccctccg

SEQ ID NO: 53307 - DNA, 50 bp, synthetic construct
  source 1..50: mol_type = other DNA
aaaacaatttccaccaaaaacacaaaacaacaaaccaaaaataaaaaaca

SEQ ID NO: 53308 - DNA, 50 bp, synthetic construct
  source 1..50: mol_type = other DNA
aaaacaatttccgccgaaaacacaaaacaacgaaccgaaaataaaaaacg

SEQ ID NO: 53309 - DNA, 50 bp, synthetic construct
  source 1..50: mol_type = other DNA
cacaaaacaacaaaccaaaaataaaaaacaaaaatacaataaactcaaca

SEQ ID NO: 53310 - DNA, 50 bp, synthetic construct
  source 1..50: mol_type = other DNA
cacaaaacaacgaaccgaaaataaaaaacgaaaatacaataaactcaacg

SEQ ID NO: 53311 - DNA, 50 bp, synthetic construct
  source 1..50: mol_type = other DNA
acaaaccaaaaataaaaaacaaaaatacaataaactcaacaccaactaca

SEQ ID NO: 53312 - DNA, 50 bp, synthetic construct
  source 1..50: mol_type = other DNA
acgaaccgaaaataaaaaacgaaaatacaataaactcaacgccgactacg

SEQ ID NO: 53313 - DNA, 50 bp, synthetic construct
  source 1..50: mol_type = other DNA
aacaaataacaaccctcaactaaaatcaattaaattcctaaaaaacccca

SEQ ID NO: 53314 - DNA, 50 bp, synthetic construct
  source 1..50: mol_type = other DNA
aacgaataacgaccctcgactaaaatcgattaaattcctaaaaaaccccg

SEQ ID NO: 53315 - DNA, 50 bp, synthetic construct
  source 1..50: mol_type = other DNA
aaaccccaattctaaaaaattcaccacaaaaacaaataaacaataaatca

SEQ ID NO: 53316 - DNA, 50 bp, synthetic construct
  source 1..50: mol_type = other DNA
aaaccccgattctaaaaaattcgccgcgaaaacaaataaacaataaatcg

SEQ ID NO: 53317 - DNA, 50 bp, synthetic construct
  source 1..50: mol_type = other DNA
aatcacaataaccctacaaataattcttttacccaaacaactcataaaca

SEQ ID NO: 53318 - DNA, 50 bp, synthetic construct
  source 1..50: mol_type = other DNA
aatcgcaataaccctacaaataattcttttacccgaacgactcgtaaacg

SEQ ID NO: 53319 - DNA, 50 bp, synthetic construct
  source 1..50: mol_type = other DNA
accccaaaaacaacttaaaacctaccaaaaactataatttcaaaaaacca

SEQ ID NO: 53320 - DNA, 50 bp, synthetic construct
  source 1..50: mol_type = other DNA
accccgaaaacgacttaaaacctaccgaaaactataatttcgaaaaaccg

SEQ ID NO: 53321 - DNA, 50 bp, synthetic construct
  source 1..50: mol_type = other DNA
acaaataattcttttacccaaacaactcataaacacattacaatttttca

SEQ ID NO: 53322 - DNA, 50 bp, synthetic construct
  source 1..50: mol_type = other DNA
acaaataattcttttacccgaacgactcgtaaacgcgttacgatttttcg

SEQ ID NO: 53323 - DNA, 50 bp, synthetic construct
  source 1..50: mol_type = other DNA
caaatcaacaaattaaccacactacattttaaaacctataatttcctaca

SEQ ID NO: 53324 - DNA, 50 bp, synthetic construct
  source 1..50: mol_type = other DNA
cgaatcgacgaattaaccgcgctacattttaaaacctataatttcctacg

SEQ ID NO: 53325 - DNA, 50 bp, synthetic construct
  source 1..50: mol_type = other DNA
accacactacattttaaaacctataatttcctacactcataacactaaca

SEQ ID NO: 53326 - DNA, 50 bp, synthetic construct
  source 1..50: mol_type = other DNA
accgcgctacattttaaaacctataatttcctacgctcgtaacgctaacg

SEQ ID NO: 53327 - DNA, 50 bp, synthetic construct
  source 1..50: mol_type = other DNA
aaaaccaacattcaatatatccacatctattctattaatcccaattccca

SEQ ID NO: 53328 - DNA, 50 bp, synthetic construct
  source 1..50: mol_type = other DNA
aaaaccgacattcaatatatccgcgtctattctattaatcccaattcccg

SEQ ID NO: 53329 - DNA, 50 bp, synthetic construct
  source 1..50: mol_type = other DNA
atacatacatatatacatactctacatacatatacacatacctaaataca

SEQ ID NO: 53330 - DNA, 50 bp, synthetic construct
  source 1..50: mol_type = other DNA
gtacgtacgtatatacgtactctacatacatatacacgtacctaaatacg

SEQ ID NO: 53331 - DNA, 50 bp, synthetic construct
  source 1..50: mol_type = other DNA
ctctctccttctatacatacccaaacacatacacatacatacaaaataca

SEQ ID NO: 53332 - DNA, 50 bp, synthetic construct
  source 1..50: mol_type = other DNA
ctctctccttctatacgtacccaaacacgtacacatacatacaaaatacg

SEQ ID NO: 53333 - DNA, 50 bp, synthetic construct
  source 1..50: mol_type = other DNA
ttctatacatacccaaacacatacacatacatacaaaatacacacacaca

SEQ ID NO: 53334 - DNA, 50 bp, synthetic construct
  source 1..50: mol_type = other DNA
ttctatacgtacccaaacacgtacacatacatacaaaatacgcacacacg

SEQ ID NO: 53335 - DNA, 50 bp, synthetic construct
  source 1..50: mol_type = other DNA
aaaccaaaatcattcacaaaaatacaaaaaaaccaaactaaaaaacacca

SEQ ID NO: 53336 - DNA, 50 bp, synthetic construct
  source 1..50: mol_type = other DNA
aaaccgaaatcattcacaaaaatacgaaaaaaccgaactaaaaaacaccg

SEQ ID NO: 53337 - DNA, 50 bp, synthetic construct
  source 1..50: mol_type = other DNA
actaaaaacaccaaaaaaccaaaatcattcacaaaaatacaaaaaaacca

SEQ ID NO: 53338 - DNA, 50 bp, synthetic construct
  source 1..50: mol_type = other DNA
actaaaaacaccaaaaaaccgaaatcattcacaaaaatacgaaaaaaccg

SEQ ID NO: 53339 - DNA, 50 bp, synthetic construct
  source 1..50: mol_type = other DNA
aaaccccaccacaaacttaaaaaaattctactaaaaacaccaaaaaacca

SEQ ID NO: 53340 - DNA, 50 bp, synthetic construct
  source 1..50: mol_type = other DNA
aaaccccgccgcaaacttaaaaaaattctactaaaaacaccaaaaaaccg

SEQ ID NO: 53341 - DNA, 50 bp, synthetic construct
  source 1..50: mol_type = other DNA
taattccaacttcttaatattcccaacaaaactccctcaaatctacaaca

SEQ ID NO: 53342 - DNA, 50 bp, synthetic construct
  source 1..50: mol_type = other DNA
taattccgacttcttaatattcccaacaaaactccctcaaatctacgacg

SEQ ID NO: 53343 - DNA, 50 bp, synthetic construct
  source 1..50: mol_type = other DNA
taatattcccaacaaaactccctcaaatctacaacaaaactctaacaaca

SEQ ID NO: 53344 - DNA, 50 bp, synthetic construct
  source 1..50: mol_type = other DNA
taatattcccaacaaaactccctcaaatctacgacgaaactctaacgacg

SEQ ID NO: 53345 - DNA, 50 bp, synthetic construct
  source 1..50: mol_type = other DNA
cataaaacaaacaataatcacaactcctacttaccctcatcaaatcaaca

SEQ ID NO: 53346 - DNA, 50 bp, synthetic construct
  source 1..50: mol_type = other DNA
cataaaacaaacaataatcacaactcctacttaccctcatcgaatcgacg

SEQ ID NO: 53347 - DNA, 50 bp, synthetic construct
  source 1..50: mol_type = other DNA
aaaacaaacaataatcacaactcctacttaccctcatcaaatcaacaaca

SEQ ID NO: 53348 - DNA, 50 bp, synthetic construct
  source 1..50: mol_type = other DNA
aaaacaaacaataatcacaactcctacttaccctcatcgaatcgacgacg

SEQ ID NO: 53349 - DNA, 50 bp, synthetic construct
  source 1..50: mol_type = other DNA
ctcaaaaaaactacctttactcctaaactccacaaacaacaacttcaaca

SEQ ID NO: 53350 - DNA, 50 bp, synthetic construct
  source 1..50: mol_type = other DNA
ctcgaaaaaactacctttactcctaaactccacaaacaacgacttcaacg

SEQ ID NO: 53351 - DNA, 50 bp, synthetic construct
  source 1..50: mol_type = other DNA
aacactaaaaccactatttataaaacccaaaaacaaaaacaacttctcca

SEQ ID NO: 53352 - DNA, 50 bp, synthetic construct
  source 1..50: mol_type = other DNA
aacgctaaaaccgctatttataaaacccaaaaacaaaaacaacttctccg

SEQ ID NO: 53353 - DNA, 50 bp, synthetic construct
  source 1..50: mol_type = other DNA
ttataaaacccaaaaacaaaaacaacttctccaaaatcaacacttaacca

SEQ ID NO: 53354 - DNA, 50 bp, synthetic construct
  source 1..50: mol_type = other DNA
ttataaaacccaaaaacaaaaacaacttctccgaaatcgacacttaaccg

SEQ ID NO: 53355 - DNA, 50 bp, synthetic construct
  source 1..50: mol_type = other DNA
ccaaaccatcaatacttactatacaaaaattaccacccctaaatccacca

SEQ ID NO: 53356 - DNA, 50 bp, synthetic construct
  source 1..50: mol_type = other DNA
ccaaaccatcaatacttactatacaaaaattaccgcccctaaatccaccg

SEQ ID NO: 53357 - DNA, 50 bp, synthetic construct
  source 1..50: mol_type = other DNA
aaccatcaatacttactatacaaaaattaccacccctaaatccaccaaca

SEQ ID NO: 53358 - DNA, 50 bp, synthetic construct
  source 1..50: mol_type = other DNA
aaccatcaatacttactatacaaaaattaccgcccctaaatccaccgacg

SEQ ID NO: 53359 - DNA, 50 bp, synthetic construct
  source 1..50: mol_type = other DNA
taacccacaaataaaacttcctcccacccctaattaaaaacaaaacctca

SEQ ID NO: 53360 - DNA, 50 bp, synthetic construct
  source 1..50: mol_type = other DNA
taacccacaaataaaacttcctcccacccctaattaaaaacgaaacctcg

SEQ ID NO: 53361 - DNA, 50 bp, synthetic construct
  source 1..50: mol_type = other DNA
caaatacaactaaaactcccaaaataacaacacacaaaaaaaaacttcca

SEQ ID NO: 53362 - DNA, 50 bp, synthetic construct
  source 1..50: mol_type = other DNA
cgaatacgactaaaactcccaaaataacaacgcacaaaaaaaaacttccg

SEQ ID NO: 53363 - DNA, 50 bp, synthetic construct
  source 1..50: mol_type = other DNA
aacctcaaacctatatcctacaaaaaaaacccataactaatacacaaaca

SEQ ID NO: 53364 - DNA, 50 bp, synthetic construct
  source 1..50: mol_type = other DNA
aacctcgaacctatatcctacaaaaaaaacccgtaactaatacacaaacg

SEQ ID NO: 53365 - DNA, 50 bp, synthetic construct
  source 1..50: mol_type = other DNA
actacaacttaactacaactataaaaataaaaacaaaactaaacccacca

SEQ ID NO: 53366 - DNA, 50 bp, synthetic construct
  source 1..50: mol_type = other DNA
actacaacttaactacgactataaaaataaaaacaaaactaaacccaccg

SEQ ID NO: 53367 - DNA, 50 bp, synthetic construct
  source 1..50: mol_type = other DNA
aacaacaaaataaacttctaaacttaaacaacccctccacaaacaaacca

SEQ ID NO: 53368 - DNA, 50 bp, synthetic construct
  source 1..50: mol_type = other DNA
aacaacaaaataaacttctaaacttaaacgacccctccgcaaacgaaccg

SEQ ID NO: 53369 - DNA, 50 bp, synthetic construct
  source 1..50: mol_type = other DNA
ataacatatcaatcaaacacaacaaaatcctatatccacactaaaccaca

SEQ ID NO: 53370 - DNA, 50 bp, synthetic construct
  source 1..50: mol_type = other DNA
ataacatatcgatcaaacacaacaaaatcctatatccgcgctaaaccgcg

SEQ ID NO: 53371 - DNA, 50 bp, synthetic construct
  source 1..50: mol_type = other DNA
ctatacctaatattaacactacctaccctactaccaataccaactataca

SEQ ID NO: 53372 - DNA, 50 bp, synthetic construct
  source 1..50: mol_type = other DNA
ctatacctaatattaacgctacctaccctactaccgataccgactatacg

SEQ ID NO: 53373 - DNA, 50 bp, synthetic construct
  source 1..50: mol_type = other DNA
tacatataataacacaataaacacaaaccacacatcataaaactatctca

SEQ ID NO: 53374 - DNA, 50 bp, synthetic construct
  source 1..50: mol_type = other DNA
tacgtataataacgcgataaacacgaaccacacgtcgtaaaactatctcg

SEQ ID NO: 53375 - DNA, 50 bp, synthetic construct
  source 1..50: mol_type = other DNA
ataattccaaaactacatataataacacaataaacacaaaccacacatca

SEQ ID NO: 53376 - DNA, 50 bp, synthetic construct
  source 1..50: mol_type = other DNA
ataattccaaaactacgtataataacgcgataaacacgaaccacacgtcg

SEQ ID NO: 53377 - DNA, 50 bp, synthetic construct
  source 1..50: mol_type = other DNA
taaataattccaaaactacatataataacacaataaacacaaaccacaca

SEQ ID NO: 53378 - DNA, 50 bp, synthetic construct
  source 1..50: mol_type = other DNA
taaataattccaaaactacgtataataacgcgataaacacgaaccacacg

SEQ ID NO: 53379 - DNA, 50 bp, synthetic construct
  source 1..50: mol_type = other DNA
acaacactctaaataattccaaaactacatataataacacaataaacaca

SEQ ID NO: 53380 - DNA, 50 bp, synthetic construct
  source 1..50: mol_type = other DNA
acaacgctctaaataattccaaaactacgtataataacgcgataaacacg

SEQ ID NO: 53381 - DNA, 50 bp, synthetic construct
  source 1..50: mol_type = other DNA
acaataacaacaacactctaaataattccaaaactacatataataacaca

SEQ ID NO: 53382 - DNA, 50 bp, synthetic construct
  source 1..50: mol_type = other DNA
acaataacgacaacgctctaaataattccaaaactacgtataataacgcg

SEQ ID NO: 53383 - DNA, 50 bp, synthetic construct
  source 1..50: mol_type = other DNA
taaaactacctaaaacactaccactactacaacatcctctacaaaaaaca

SEQ ID NO: 53384 - DNA, 50 bp, synthetic construct
  source 1..50: mol_type = other DNA
taaaactacctaaaacgctaccgctactacaacgtcctctacgaaaaacg

SEQ ID NO: 53385 - DNA, 50 bp, synthetic construct
  source 1..50: mol_type = other DNA
ataaacacaatacatactccaaacaaaaaccaacatacacaaaaaaacca

SEQ ID NO: 53386 - DNA, 50 bp, synthetic construct
  source 1..50: mol_type = other DNA
ataaacacgatacgtactccaaacaaaaaccaacgtacgcgaaaaaaccg

SEQ ID NO: 53387 - DNA, 50 bp, synthetic construct
  source 1..50: mol_type = other DNA
ctctacccccaataactataacacataacaaaaacccctaaaactcaaca

SEQ ID NO: 53388 - DNA, 50 bp, synthetic construct
  source 1..50: mol_type = other DNA
ctctacccccaataactataacacgtaacaaaaacccctaaaactcaacg

SEQ ID NO: 53389 - DNA, 50 bp, synthetic construct
  source 1..50: mol_type = other DNA
atatcattactaaaaaaacaaaataaaactcaaaccaaccctaatcacca

SEQ ID NO: 53390 - DNA, 50 bp, synthetic construct
  source 1..50: mol_type = other DNA
atatcattactaaaaaaacaaaataaaactcaaaccaaccctaatcgccg

SEQ ID NO: 53391 - DNA, 50 bp, synthetic construct
  source 1..50: mol_type = other DNA
cccaaaaaacataaaaaacctaaaaaaaatctttaacaaatcccctctca

SEQ ID NO: 53392 - DNA, 50 bp, synthetic construct
  source 1..50: mol_type = other DNA
cccgaaaaacataaaaaacctaaaaaaaatctttaacaaatcccctctcg

SEQ ID NO: 53393 - DNA, 50 bp, synthetic construct
  source 1..50: mol_type = other DNA
aacctaaaaaaaacctccaaccccaaaaacctaaccatactaaaaaaaca

SEQ ID NO: 53394 - DNA, 50 bp, synthetic construct
  source 1..50: mol_type = other DNA
aacctaaaaaaaacctccaaccccgaaaacctaaccgtactaaaaaaacg

SEQ ID NO: 53395 - DNA, 50 bp, synthetic construct
  source 1..50: mol_type = other DNA
aaaaaaacacaaaaacttccaaaacccaactcctataaatcacaacccca

SEQ ID NO: 53396 - DNA, 50 bp, synthetic construct
  source 1..50: mol_type = other DNA
aaaaaaacgcgaaaacttccaaaacccgactcctataaatcacaaccccg

SEQ ID NO: 53397 - DNA, 50 bp, synthetic construct
  source 1..50: mol_type = other DNA
acaacctcaaaacaaaactaaaacctacaaaaaaaaacctataccccaca

SEQ ID NO: 53398 - DNA, 50 bp, synthetic construct
  source 1..50: mol_type = other DNA
acaacctcgaaacaaaactaaaacctacgaaaaaaaacctataccccacg

SEQ ID NO: 53399 - DNA, 50 bp, synthetic construct
  source 1..50: mol_type = other DNA
caaaaaccaaataacaaccataactaacaaacctcctcctcaataaaaca

SEQ ID NO: 53400 - DNA, 50 bp, synthetic construct
  source 1..50: mol_type = other DNA
caaaaaccaaataacaaccataactaacgaacctcctcctcgataaaacg

SEQ ID NO: 53401 - DNA, 50 bp, synthetic construct
  source 1..50: mol_type = other DNA
aataaacatacaactaacaacacaaaaccaaaaaaaacaccaccaaacca

SEQ ID NO: 53402 - DNA, 50 bp, synthetic construct
  source 1..50: mol_type = other DNA
aataaacgtacaactaacaacacaaaaccgaaaaaaacgccgccaaaccg

SEQ ID NO: 53403 - DNA, 50 bp, synthetic construct
  source 1..50: mol_type = other DNA
ctaaacctaaacaatactaaaaaaacaataaatacccacacccttacaca

SEQ ID NO: 53404 - DNA, 50 bp, synthetic construct
  source 1..50: mol_type = other DNA
ctaaacctaaacaatactaaaaaaacgataaatacccacgcccttacgcg

SEQ ID NO: 53405 - DNA, 50 bp, synthetic construct
  source 1..50: mol_type = other DNA
aaaataataaaacatccctacccaacacctacaaaaactcctaaaaaaca

SEQ ID NO: 53406 - DNA, 50 bp, synthetic construct
  source 1..50: mol_type = other DNA
aaaataataaaacgtccctacccgacgcctacaaaaactcctaaaaaacg

SEQ ID NO: 53407 - DNA, 50 bp, synthetic construct
  source 1..50: mol_type = other DNA
ccccatttcttaaaacaaaaacaaccctaaaaaaaacaaactacaaaaca

SEQ ID NO: 53408 - DNA, 50 bp, synthetic construct
  source 1..50: mol_type = other DNA
ccccatttcttaaaacgaaaacgaccctaaaaaaaacgaactacaaaacg

SEQ ID NO: 53409 - DNA, 50 bp, synthetic construct
  source 1..50: mol_type = other DNA
aaaacaaaaacaaccctaaaaaaaacaaactacaaaacaaataaacaaca

SEQ ID NO: 53410 - DNA, 50 bp, synthetic construct
  source 1..50: mol_type = other DNA
aaaacgaaaacgaccctaaaaaaaacgaactacaaaacgaataaacaacg

SEQ ID NO: 53411 - DNA, 50 bp, synthetic construct
  source 1..50: mol_type = other DNA
acaaaaacaaccctaaaaaaaacaaactacaaaacaaataaacaacaaca

SEQ ID NO: 53412 - DNA, 50 bp, synthetic construct
  source 1..50: mol_type = other DNA
acgaaaacgaccctaaaaaaaacgaactacaaaacgaataaacaacgacg

SEQ ID NO: 53413 - DNA, 50 bp, synthetic construct
  source 1..50: mol_type = other DNA
aaaaacaaccctaaaaaaaacaaactacaaaacaaataaacaacaacaca

SEQ ID NO: 53414 - DNA, 50 bp, synthetic construct
  source 1..50: mol_type = other DNA
gaaaacgaccctaaaaaaaacgaactacaaaacgaataaacaacgacgcg

SEQ ID NO: 53415 - DNA, 50 bp, synthetic construct
  source 1..50: mol_type = other DNA
caaaacaaataaacaacaacacaactactcctaaaatacacctaaaaaca

SEQ ID NO: 53416 - DNA, 50 bp, synthetic construct
  source 1..50: mol_type = other DNA
caaaacgaataaacaacgacgcgactactcctaaaatacacctaaaaacg

SEQ ID NO: 53417 - DNA, 50 bp, synthetic construct
  source 1..50: mol_type = other DNA
aacaaataaacaacaacacaactactcctaaaatacacctaaaaacaaca

SEQ ID NO: 53418 - DNA, 50 bp, synthetic construct
  source 1..50: mol_type = other DNA
aacgaataaacaacgacgcgactactcctaaaatacacctaaaaacgacg

SEQ ID NO: 53419 - DNA, 50 bp, synthetic construct
  source 1..50: mol_type = other DNA
aaaaaccaactttaactacttatcaaaaaacctcaaacctaacaacaaca

SEQ ID NO: 53420 - DNA, 50 bp, synthetic construct
  source 1..50: mol_type = other DNA
aaaaaccaactttaactacttatcgaaaaacctcaaacctaacgacgacg

SEQ ID NO: 53421 - DNA, 50 bp, synthetic construct
  source 1..50: mol_type = other DNA
tacaataaaacacaaaacccaaaaaacaacccaaaactcaaaataaaaca

SEQ ID NO: 53422 - DNA, 50 bp, synthetic construct
  source 1..50: mol_type = other DNA
tacgataaaacgcgaaacccgaaaaacgacccaaaactcgaaataaaacg

SEQ ID NO: 53423 - DNA, 50 bp, synthetic construct
  source 1..50: mol_type = other DNA
aacctaaaaaacaacaaacacaacaaataaactcaacaaaaaataaaaca

SEQ ID NO: 53424 - DNA, 50 bp, synthetic construct
  source 1..50: mol_type = other DNA
gacctaaaaaacgacgaacgcgacgaataaactcgacgaaaaataaaacg

SEQ ID NO: 53425 - DNA, 50 bp, synthetic construct
  source 1..50: mol_type = other DNA
tcaacataaacaaaaaaaacctaaaatcaaccttacaaacctaccataca

SEQ ID NO: 53426 - DNA, 50 bp, synthetic construct
  source 1..50: mol_type = other DNA
tcaacataaacgaaaaaaacctaaaatcgaccttacaaacctaccgtacg

SEQ ID NO: 53427 - DNA, 50 bp, synthetic construct
  source 1..50: mol_type = other DNA
acaaacctaccatacacaactacaacaaataaaactaaccttaaacacca

SEQ ID NO: 53428 - DNA, 50 bp, synthetic construct
  source 1..50: mol_type = other DNA
acaaacctaccgtacgcaactacaacaaataaaactaaccttaaacgccg

SEQ ID NO: 53429 - DNA, 50 bp, synthetic construct
  source 1..50: mol_type = other DNA
taacctacaccaactacaaaaaaacctaaaaaaactcatcaaactcacca

SEQ ID NO: 53430 - DNA, 50 bp, synthetic construct
  source 1..50: mol_type = other DNA
taacctacgccaactacaaaaaaacctaaaaaaactcatcgaactcaccg

SEQ ID NO: 53431 - DNA, 50 bp, synthetic construct
  source 1..50: mol_type = other DNA
tatctatcaaaaaaaacaacttattaaccacactaaacaaaaaacaccca

SEQ ID NO: 53432 - DNA, 50 bp, synthetic construct
  source 1..50: mol_type = other DNA
tatctatcaaaaaaaacaacttattaaccgcgctaaacgaaaaacgcccg

SEQ ID NO: 53433 - DNA, 50 bp, synthetic construct
  source 1..50: mol_type = other DNA
atcaaaaaaaacaacttattaaccacactaaacaaaaaacacccaaacca

SEQ ID NO: 53434 - DNA, 50 bp, synthetic construct
  source 1..50: mol_type = other DNA
atcaaaaaaaacaacttattaaccgcgctaaacgaaaaacgcccgaaccg

SEQ ID NO: 53435 - DNA, 50 bp, synthetic construct
  source 1..50: mol_type = other DNA
actttccaaaaaaccatcactaaaacaataaaaacaccaacaacaaccca

SEQ ID NO: 53436 - DNA, 50 bp, synthetic construct
  source 1..50: mol_type = other DNA
actttccgaaaaaccatcactaaaacgataaaaacaccaacaacgacccg

SEQ ID NO: 53437 - DNA, 50 bp, synthetic construct
  source 1..50: mol_type = other DNA
aaaaaccatcactaaaacaataaaaacaccaacaacaacccataaatcca

SEQ ID NO: 53438 - DNA, 50 bp, synthetic construct
  source 1..50: mol_type = other DNA
aaaaaccatcactaaaacgataaaaacaccaacaacgacccgtaaatccg

SEQ ID NO: 53439 - DNA, 50 bp, synthetic construct
  source 1..50: mol_type = other DNA
cacacaaaacatattctaaaacaaccaaatccatcccaaaaaaaaataca

SEQ ID NO: 53440 - DNA, 50 bp, synthetic construct
  source 1..50: mol_type = other DNA
cacacgaaacatattctaaaacaaccaaatccatcccgaaaaaaaatacg

SEQ ID NO: 53441 - DNA, 50 bp, synthetic construct
  source 1..50: mol_type = other DNA
aaccctacccccaaaatacatactaaaaatcacctaacccaaacataaca

SEQ ID NO: 53442 - DNA, 50 bp, synthetic construct
  source 1..50: mol_type = other DNA
aaccctacccccgaaatacatactaaaaatcacctaacccaaacataacg

SEQ ID NO: 53443 - DNA, 50 bp, synthetic construct
  source 1..50: mol_type = other DNA
cataacaaactaaatccaaaaaaaatctacatattaaaaaacaaacaaca

SEQ ID NO: 53444 - DNA, 50 bp, synthetic construct
  source 1..50: mol_type = other DNA
cataacgaactaaatccaaaaaaaatctacatattaaaaaacgaacaacg

SEQ ID NO: 53445 - DNA, 50 bp, synthetic construct
  source 1..50: mol_type = other DNA
cataacataacatcaacccaactacaaaaaaaactaacaaaaacccaaca

SEQ ID NO: 53446 - DNA, 50 bp, synthetic construct
  source 1..50: mol_type = other DNA
cataacgtaacgtcaacccaactacaaaaaaaactaacaaaaacccaacg

SEQ ID NO: 53447 - DNA, 50 bp, synthetic construct
  source 1..50: mol_type = other DNA
caactacaaaaaaaactaacaaaaacccaacaccaactaaaacaactcca

SEQ ID NO: 53448 - DNA, 50 bp, synthetic construct
  source 1..50: mol_type = other DNA
caactacaaaaaaaactaacaaaaacccaacgccaactaaaacaactccg

SEQ ID NO: 53449 - DNA, 50 bp, synthetic construct
  source 1..50: mol_type = other DNA
attctaaaaaccccacaaacactataaacaaaacataaaaccccaacaca

SEQ ID NO: 53450 - DNA, 50 bp, synthetic construct
  source 1..50: mol_type = other DNA
attctaaaaaccccacaaacactataaacgaaacgtaaaaccccaacacg

SEQ ID NO: 53451 - DNA, 50 bp, synthetic construct
  source 1..50: mol_type = other DNA
aaacataaaaccccaacacaaactaccctcaaaaaaaccaatattaccca

SEQ ID NO: 53452 - DNA, 50 bp, synthetic construct
  source 1..50: mol_type = other DNA
aaacgtaaaaccccaacacgaactaccctcaaaaaaaccaatattacccg

SEQ ID NO: 53453 - DNA, 50 bp, synthetic construct
  source 1..50: mol_type = other DNA
cccaacacaaactaccctcaaaaaaaccaatattacccaaaaaaaaacca

SEQ ID NO: 53454 - DNA, 50 bp, synthetic construct
  source 1..50: mol_type = other DNA
cccaacacgaactaccctcaaaaaaaccaatattacccgaaaaaaaaccg

SEQ ID NO: 53455 - DNA, 50 bp, synthetic construct
  source 1..50: mol_type = other DNA
caaaaaaaaactataacccaccacataaaacactcttaataaaacaaaca

SEQ ID NO: 53456 - DNA, 50 bp, synthetic construct
  source 1..50: mol_type = other DNA
cgaaaaaaaactataacccaccacgtaaaacactcttaataaaacaaacg

SEQ ID NO: 53457 - DNA, 50 bp, synthetic construct
  source 1..50: mol_type = other DNA
cacatttcatctaaacttcaaacaaaacacaacaaataaataaaactaca

SEQ ID NO: 53458 - DNA, 50 bp, synthetic construct
  source 1..50: mol_type = other DNA
cacgtttcatctaaacttcgaacgaaacgcaacaaataaataaaactacg

SEQ ID NO: 53459 - DNA, 50 bp, synthetic construct
  source 1..50: mol_type = other DNA
tttttgtttagatatggttttttgtgttaggtagtgtttttaagttgttt

SEQ ID NO: 53460 - DNA, 50 bp, synthetic construct
  source 1..50: mol_type = other DNA
tttttgtttagatatggttttttgtgttaggtagtgtttttaagtcgttc

SEQ ID NO: 53461 - DNA, 50 bp, synthetic construct
  source 1..50: mol_type = other DNA
aataaccacaactatcttacccctcctcacaaccatactaaatattacca

SEQ ID NO: 53462 - DNA, 50 bp, synthetic construct
  source 1..50: mol_type = other DNA
aataaccacaactatcttacccctcctcacgaccgtactaaatattaccg

SEQ ID NO: 53463 - DNA, 50 bp, synthetic construct
  source 1..50: mol_type = other DNA
acaaaaactcccaataaaataaactaaaactactctacctaacccctcca

SEQ ID NO: 53464 - DNA, 50 bp, synthetic construct
  source 1..50: mol_type = other DNA
acgaaaactcccgataaaataaactaaaactactctacctaacccctccg

SEQ ID NO: 53465 - DNA, 50 bp, synthetic construct
  source 1..50: mol_type = other DNA
taccaaaccttaaaacttcctatactaaatcaaaactaaaacaaaaaaca

SEQ ID NO: 53466 - DNA, 50 bp, synthetic construct
  source 1..50: mol_type = other DNA
taccaaaccttaaaacttcctatactaaatcaaaactaaaacgaaaaacg

SEQ ID NO: 53467 - DNA, 50 bp, synthetic construct
  source 1..50: mol_type = other DNA
aaaacttcctatactaaatcaaaactaaaacaaaaaacacaaaaacccca

SEQ ID NO: 53468 - DNA, 50 bp, synthetic construct
  source 1..50: mol_type = other DNA
aaaacttcctatactaaatcaaaactaaaacgaaaaacgcaaaaaccccg

SEQ ID NO: 53469 - DNA, 50 bp, synthetic construct
  source 1..50: mol_type = other DNA
aaaacaaaaaacaaaatcatcaacctcaaatccaaaacccaatacaaaca

SEQ ID NO: 53470 - DNA, 50 bp, synthetic construct
  source 1..50: mol_type = other DNA
aaaacgaaaaacgaaatcgtcaacctcgaatccaaaacccgatacaaacg

SEQ ID NO: 53471 - DNA, 50 bp, synthetic construct
  source 1..50: mol_type = other DNA
aaaaaaaaacacaaaaacaacaaacaaaactacaaaacaatacaacaaca

SEQ ID NO: 53472 - DNA, 50 bp, synthetic construct
  source 1..50: mol_type = other DNA
aaaaaaaaacgcgaaaacaacgaacgaaactacaaaacaatacgacgacg

SEQ ID NO: 53473 - DNA, 50 bp, synthetic construct
  source 1..50: mol_type = other DNA
aaaaaacacaaaaacaacaaacaaaactacaaaacaatacaacaacaaca

SEQ ID NO: 53474 - DNA, 50 bp, synthetic construct
  source 1..50: mol_type = other DNA
aaaaaacgcgaaaacaacgaacgaaactacaaaacaatacgacgacgacg

SEQ ID NO: 53475 - DNA, 50 bp, synthetic construct
  source 1..50: mol_type = other DNA
caacaaaaacaataaataccaaactatcccaaaaaccaaaataaaatcca

SEQ ID NO: 53476 - DNA, 50 bp, synthetic construct
  source 1..50: mol_type = other DNA
cgacgaaaacgataaataccaaactatcccgaaaaccaaaataaaatccg

SEQ ID NO: 53477 - DNA, 50 bp, synthetic construct
  source 1..50: mol_type = other DNA
aactcatacaatctaatatccaacttactaaaaaaacaaaaataaatcca

SEQ ID NO: 53478 - DNA, 50 bp, synthetic construct
  source 1..50: mol_type = other DNA
aactcgtacaatctaatatccgacttactaaaaaaacaaaaataaatccg

SEQ ID NO: 53479 - DNA, 50 bp, synthetic construct
  source 1..50: mol_type = other DNA
actacctacaatccaataatatccctaaacacctccaaccaatataaaca

SEQ ID NO: 53480 - DNA, 50 bp, synthetic construct
  source 1..50: mol_type = other DNA
actacctacgatccgataatatccctaaacacctccaaccaatataaacg

SEQ ID NO: 53481 - DNA, 50 bp, synthetic construct
  source 1..50: mol_type = other DNA
cactaacactttatttaaacacaaaccttctctaaaacccaaaaaaacca

SEQ ID NO: 53482 - DNA, 50 bp, synthetic construct
  source 1..50: mol_type = other DNA
cgctaacgctttatttaaacgcgaaccttctctaaaacccgaaaaaaccg

SEQ ID NO: 53483 - DNA, 50 bp, synthetic construct
  source 1..50: mol_type = other DNA
aaactacaaaactaaccactttcatcctacactaacactttatttaaaca

SEQ ID NO: 53484 - DNA, 50 bp, synthetic construct
  source 1..50: mol_type = other DNA
aaactacgaaactaaccgctttcatcctacgctaacgctttatttaaacg

SEQ ID NO: 53485 - DNA, 50 bp, synthetic construct
  source 1..50: mol_type = other DNA
cccaactttcaaaaaaaacaaactacaaaactaaccactttcatcctaca

SEQ ID NO: 53486 - DNA, 50 bp, synthetic construct
  source 1..50: mol_type = other DNA
cccaactttcaaaaaaaacaaactacgaaactaaccgctttcatcctacg

SEQ ID NO: 53487 - DNA, 50 bp, synthetic construct
  source 1..50: mol_type = other DNA
ctccaaaaaaaacccacatctaaataaaacaccaacacaaaataaaaaca

SEQ ID NO: 53488 - DNA, 50 bp, synthetic construct
  source 1..50: mol_type = other DNA
ctccaaaaaaaacccgcgtctaaataaaacgccaacgcaaaataaaaacg

SEQ ID NO: 53489 - DNA, 50 bp, synthetic construct
  source 1..50: mol_type = other DNA
actctcaatcaatacaaacacaaaatcccaaccactcctaaaaaacaaca

SEQ ID NO: 53490 - DNA, 50 bp, synthetic construct
  source 1..50: mol_type = other DNA
actctcgatcaatacgaacacgaaatcccaaccactcctaaaaaacaacg

SEQ ID NO: 53491 - DNA, 50 bp, synthetic construct
  source 1..50: mol_type = other DNA
cccaacacaaaaataaacaaaaaacccaatacctcaaaactcaatataca

SEQ ID NO: 53492 - DNA, 50 bp, synthetic construct
  source 1..50: mol_type = other DNA
cccaacgcaaaaataaacgaaaaacccgatacctcgaaactcgatatacg

SEQ ID NO: 53493 - DNA, 50 bp, synthetic construct
  source 1..50: mol_type = other DNA
aaaaataaacaaaaaacccaatacctcaaaactcaatatacacaaaaaca

SEQ ID NO: 53494 - DNA, 50 bp, synthetic construct
  source 1..50: mol_type = other DNA
aaaaataaacgaaaaacccgatacctcgaaactcgatatacgcaaaaacg

SEQ ID NO: 53495 - DNA, 50 bp, synthetic construct
  source 1..50: mol_type = other DNA
aacccaatacctcaaaactcaatatacacaaaaacaataaataaaataca

SEQ ID NO: 53496 - DNA, 50 bp, synthetic construct
  source 1..50: mol_type = other DNA
aacccgatacctcgaaactcgatatacgcaaaaacgataaataaaatacg

SEQ ID NO: 53497 - DNA, 50 bp, synthetic construct
  source 1..50: mol_type = other DNA
cctcaaaactcaatatacacaaaaacaataaataaaatacaaaaacacca

SEQ ID NO: 53498 - DNA, 50 bp, synthetic construct
  source 1..50: mol_type = other DNA
cctcgaaactcgatatacgcaaaaacgataaataaaatacgaaaacaccg

SEQ ID NO: 53499 - DNA, 50 bp, synthetic construct
  source 1..50: mol_type = other DNA
cctaacaaccaaaccaaaatatccaacctaacaaaaattaaaaaataaca

SEQ ID NO: 53500 - DNA, 50 bp, synthetic construct
  source 1..50: mol_type = other DNA
cctaacaaccaaaccgaaatatccgacctaacaaaaattaaaaaataacg

SEQ ID NO: 53501 - DNA, 50 bp, synthetic construct
  source 1..50: mol_type = other DNA
caccaaaaacaaaaccaaaatctcctaaaacctaaattctccacatcaca

SEQ ID NO: 53502 - DNA, 50 bp, synthetic construct
  source 1..50: mol_type = other DNA
cgccaaaaacaaaaccaaaatctcctaaaacctaaattctccacatcgcg

SEQ ID NO: 53503 - DNA, 50 bp, synthetic construct
  source 1..50: mol_type = other DNA
caaaactaaaaataaaaaacctaatatacacacatacccaaacctacaca

SEQ ID NO: 53504 - DNA, 50 bp, synthetic construct
  source 1..50: mol_type = other DNA
caaaactaaaaataaaaaacctaatatacacgcgtacccaaacctacacg

SEQ ID NO: 53505 - DNA, 50 bp, synthetic construct
  source 1..50: mol_type = other DNA
aaaaataaaaaacctaatatacacacatacccaaacctacacataaacca

SEQ ID NO: 53506 - DNA, 50 bp, synthetic construct
  source 1..50: mol_type = other DNA
aaaaataaaaaacctaatatacacgcgtacccaaacctacacgtaaaccg

SEQ ID NO: 53507 - DNA, 50 bp, synthetic construct
  source 1..50: mol_type = other DNA
ccacataaaaataaacaaatcaaaaaaaccaaaaaacctaaatcctacca

SEQ ID NO: 53508 - DNA, 50 bp, synthetic construct
  source 1..50: mol_type = other DNA
ccgcgtaaaaataaacaaatcaaaaaaaccaaaaaacctaaatcctaccg

SEQ ID NO: 53509 - DNA, 50 bp, synthetic construct
  source 1..50: mol_type = other DNA
aaaaacccccccaacacaaaaaaaaattaacaaacatatataaccaacca

SEQ ID NO: 53510 - DNA, 50 bp, synthetic construct
  source 1..50: mol_type = other DNA
aaaaacccccccgacacaaaaaaaaattaacaaacgtatataaccaaccg

SEQ ID NO: 53511 - DNA, 50 bp, synthetic construct
  source 1..50: mol_type = other DNA
acaaatataacaactaaacctaaccctaacccctattactacaaaaccca

SEQ ID NO: 53512 - DNA, 50 bp, synthetic construct
  source 1..50: mol_type = other DNA
acgaatataacgactaaacctaaccctaacccctattactacaaaacccg

SEQ ID NO: 53513 - DNA, 50 bp, synthetic construct
  source 1..50: mol_type = other DNA
aaatcatattccaatatctataaaaaaactacaaaaaaatactaaacaca

SEQ ID NO: 53514 - DNA, 50 bp, synthetic construct
  source 1..50: mol_type = other DNA
aaatcatattccaatatctataaaaaaactacgaaaaaatactaaacacg

SEQ ID NO: 53515 - DNA, 50 bp, synthetic construct
  source 1..50: mol_type = other DNA
tcatattccaatatctataaaaaaactacaaaaaaatactaaacacaaca

SEQ ID NO: 53516 - DNA, 50 bp, synthetic construct
  source 1..50: mol_type = other DNA
tcatattccaatatctataaaaaaactacgaaaaaatactaaacacgacg

SEQ ID NO: 53517 - DNA, 50 bp, synthetic construct
  source 1..50: mol_type = other DNA
aactacaaaaaaatactaaacacaacatcaacaatacaaaaacacatcca

SEQ ID NO: 53518 - DNA, 50 bp, synthetic construct
  source 1..50: mol_type = other DNA
aactacgaaaaaatactaaacacgacgtcgacgatacaaaaacacatccg

SEQ ID NO: 53519 - DNA, 50 bp, synthetic construct
  source 1..50: mol_type = other DNA
aaaaacacatccacctaatacacctaaaatacaacaaaacctaaaataca

SEQ ID NO: 53520 - DNA, 50 bp, synthetic construct
  source 1..50: mol_type = other DNA
aaaaacacatccgcctaatacacctaaaatacgacgaaacctaaaatacg

SEQ ID NO: 53521 - DNA, 50 bp, synthetic construct
  source 1..50: mol_type = other DNA
aacacatccacctaatacacctaaaatacaacaaaacctaaaatacaaca

SEQ ID NO: 53522 - DNA, 50 bp, synthetic construct
  source 1..50: mol_type = other DNA
aacacatccgcctaatacacctaaaatacgacgaaacctaaaatacgacg

SEQ ID NO: 53523 - DNA, 50 bp, synthetic construct
  source 1..50: mol_type = other DNA
acctaatacacctaaaatacaacaaaacctaaaatacaacaaaacctaca

SEQ ID NO: 53524 - DNA, 50 bp, synthetic construct
  source 1..50: mol_type = other DNA
gcctaatacacctaaaatacgacgaaacctaaaatacgacgaaacctacg

SEQ ID NO: 53525 - DNA, 50 bp, synthetic construct
  source 1..50: mol_type = other DNA
tataaacacacctatctatatacatcctatacacacactactaccctaca

SEQ ID NO: 53526 - DNA, 50 bp, synthetic construct
  source 1..50: mol_type = other DNA
tataaacacacctatctatatacgtcctatacgcacactactaccctacg

SEQ ID NO: 53527 - DNA, 50 bp, synthetic construct
  source 1..50: mol_type = other DNA
ctaaacaaaatacaactctactcaaacaaaacacaccaaaaacaaaaaca

SEQ ID NO: 53528 - DNA, 50 bp, synthetic construct
  source 1..50: mol_type = other DNA
ctaaacaaaatacaactctactcgaacaaaacgcaccaaaaacgaaaacg

SEQ ID NO: 53529 - DNA, 50 bp, synthetic construct
  source 1..50: mol_type = other DNA
cctacaaacatctcctaaaaaacaaaatatataaactatataacaataca

SEQ ID NO: 53530 - DNA, 50 bp, synthetic construct
  source 1..50: mol_type = other DNA
cctacgaacgtctcctaaaaaacgaaatatataaactatataacgatacg

SEQ ID NO: 53531 - DNA, 50 bp, synthetic construct
  source 1..50: mol_type = other DNA
acaaaatttcacaacataataaacatcaccaacccacaaccaaaacaaca

SEQ ID NO: 53532 - DNA, 50 bp, synthetic construct
  source 1..50: mol_type = other DNA
acaaaatttcgcaacgtaataaacatcaccaacccacaaccaaaacgacg

SEQ ID NO: 53533 - DNA, 50 bp, synthetic construct
  source 1..50: mol_type = other DNA
ataactaaatcacttttttctacatccccccctcttacaaaatctactca

SEQ ID NO: 53534 - DNA, 50 bp, synthetic construct
  source 1..50: mol_type = other DNA
ataactaaatcacttttttctacatccccccctcttacaaaatctactcg

SEQ ID NO: 53535 - DNA, 50 bp, synthetic construct
  source 1..50: mol_type = other DNA
tactaaaaacaaaataattttataaataaacaaaccactataatcacaca

SEQ ID NO: 53536 - DNA, 50 bp, synthetic construct
  source 1..50: mol_type = other DNA
tactaaaaacaaaataattttataaataaacaaaccactataatcacacg

SEQ ID NO: 53537 - DNA, 50 bp, synthetic construct
  source 1..50: mol_type = other DNA
taattttataaataaacaaaccactataatcacacatatttcattttcca

SEQ ID NO: 53538 - DNA, 50 bp, synthetic construct
  source 1..50: mol_type = other DNA
taattttataaataaacaaaccactataatcacacgtatttcattttccg

SEQ ID NO: 53539 - DNA, 50 bp, synthetic construct
  source 1..50: mol_type = other DNA
ccatcatcacacaaattctcttaaccctatatatcaaaatttcacataca

SEQ ID NO: 53540 - DNA, 50 bp, synthetic construct
  source 1..50: mol_type = other DNA
ccatcatcacacaaattctcttaaccctatatatcgaaatttcacgtacg

SEQ ID NO: 53541 - DNA, 50 bp, synthetic construct
  source 1..50: mol_type = other DNA
taaccaacacaaacacttcaaaaaaactaaactcccacaacactccctca

SEQ ID NO: 53542 - DNA, 50 bp, synthetic construct
  source 1..50: mol_type = other DNA
taaccaacacaaacacttcaaaaaaactaaactcccacaacactccctcg

SEQ ID NO: 53543 - DNA, 50 bp, synthetic construct
  source 1..50: mol_type = other DNA
aaattatatctattccttttaaaaaacttataccataaaaactactatca

SEQ ID NO: 53544 - DNA, 50 bp, synthetic construct
  source 1..50: mol_type = other DNA
aaattatatctattccttttaaaaaacttataccataaaaactactatcg

SEQ ID NO: 53545 - DNA, 50 bp, synthetic construct
  source 1..50: mol_type = other DNA
tttacttactcctattttaactaaaacaaaaattaaaactcaacaaacca

SEQ ID NO: 53546 - DNA, 50 bp, synthetic construct
  source 1..50: mol_type = other DNA
tttacttactcctattttaactaaaacaaaaattaaaactcaacaaaccg

SEQ ID NO: 53547 - DNA, 50 bp, synthetic construct
  source 1..50: mol_type = other DNA
atttacactaaaaaacaatataaaacacacatcacatttaaaaattcaca

SEQ ID NO: 53548 - DNA, 50 bp, synthetic construct
  source 1..50: mol_type = other DNA
atttacactaaaaaacaatataaaacacgcatcacatttaaaaattcacg

SEQ ID NO: 53549 - DNA, 50 bp, synthetic construct
  source 1..50: mol_type = other DNA
tattcattatattcacaaaaaatttacactaaaaaacaatataaaacaca

SEQ ID NO: 53550 - DNA, 50 bp, synthetic construct
  source 1..50: mol_type = other DNA
tattcattatattcacaaaaaatttacactaaaaaacaatataaaacacg

SEQ ID NO: 53551 - DNA, 50 bp, synthetic construct
  source 1..50: mol_type = other DNA
agatatttggttagagttaggtttaaagagaaaagttgagaatttaggtt

SEQ ID NO: 53552 - DNA, 50 bp, synthetic construct
  source 1..50: mol_type = other DNA
agatatttggttagagttaggtttaaagagaaaagttgagaatttaggtc

SEQ ID NO: 53553 - DNA, 50 bp, synthetic construct
  source 1..50: mol_type = other DNA
aaacaaaatacaaaaacctacacactaaccctacacaaccttcctaaaca

SEQ ID NO: 53554 - DNA, 50 bp, synthetic construct
  source 1..50: mol_type = other DNA
aaacaaaatacaaaaacctacacgctaaccctacacgaccttcctaaacg

SEQ ID NO: 53555 - DNA, 50 bp, synthetic construct
  source 1..50: mol_type = other DNA
caaaaaaacacatattaacaacccaactataaattacccaaaacccacca

SEQ ID NO: 53556 - DNA, 50 bp, synthetic construct
  source 1..50: mol_type = other DNA
cgaaaaaacgcgtattaacaacccaactataaattacccaaaacccaccg

SEQ ID NO: 53557 - DNA, 50 bp, synthetic construct
  source 1..50: mol_type = other DNA
aacaaacaccatctccttccccaatataaaaaaaaataaaaaaaacatca

SEQ ID NO: 53558 - DNA, 50 bp, synthetic construct
  source 1..50: mol_type = other DNA
aacaaacaccatctccttccccaatataaaaaaaaataaaaaaaacatcg

SEQ ID NO: 53559 - DNA, 50 bp, synthetic construct
  source 1..50: mol_type = other DNA
ataaatcacaccaacttctaaacaaatccttacatttccttctctctaca

SEQ ID NO: 53560 - DNA, 50 bp, synthetic construct
  source 1..50: mol_type = other DNA
ataaatcacaccgacttctaaacgaatccttacgtttccttctctctacg

SEQ ID NO: 53561 - DNA, 50 bp, synthetic construct
  source 1..50: mol_type = other DNA
tacacccacactccaaaaatacacatatccctaacaaaatttctaacaca

SEQ ID NO: 53562 - DNA, 50 bp, synthetic construct
  source 1..50: mol_type = other DNA
tacgcccacactccaaaaatacacatatccctaacgaaatttctaacacg

SEQ ID NO: 53563 - DNA, 50 bp, synthetic construct
  source 1..50: mol_type = other DNA
ccaaactaaaaccccaatacaaactccacactaaaaaactacaccctaca

SEQ ID NO: 53564 - DNA, 50 bp, synthetic construct
  source 1..50: mol_type = other DNA
ccaaactaaaaccccaatacaaactccacgctaaaaaactacaccctacg

SEQ ID NO: 53565 - DNA, 50 bp, synthetic construct
  source 1..50: mol_type = other DNA
aaaaccattactttcaatttacttccccaatcctaacacacaaacacaca

SEQ ID NO: 53566 - DNA, 50 bp, synthetic construct
  source 1..50: mol_type = other DNA
aaaaccattactttcaatttacttccccaatcctaacacacaaacgcgcg

SEQ ID NO: 53567 - DNA, 50 bp, synthetic construct
  source 1..50: mol_type = other DNA
acccaaacctaaattcttcctacaaacaaaaaacactaacaaaaactaca

SEQ ID NO: 53568 - DNA, 50 bp, synthetic construct
  source 1..50: mol_type = other DNA
acccaaacctaaattcttcctacgaacgaaaaacactaacgaaaactacg

SEQ ID NO: 53569 - DNA, 50 bp, synthetic construct
  source 1..50: mol_type = other DNA
atacaaattctcaaaaaaacaaaccccacaacctccatcaatatcttcca

SEQ ID NO: 53570 - DNA, 50 bp, synthetic construct
  source 1..50: mol_type = other DNA
atacaaattctcaaaaaaacaaaccccgcaacctccgtcaatatcttccg

SEQ ID NO: 53571 - DNA, 50 bp, synthetic construct
  source 1..50: mol_type = other DNA
caaaaaactaccaaatccaactctactaaaaacctccacaaacaaaatca

SEQ ID NO: 53572 - DNA, 50 bp, synthetic construct
  source 1..50: mol_type = other DNA
cgaaaaactaccaaatccaactctactaaaaacctccacgaacgaaatcg

SEQ ID NO: 53573 - DNA, 50 bp, synthetic construct
  source 1..50: mol_type = other DNA
cataaccaaaaaactaccaaatccaactctactaaaaacctccacaaaca

SEQ ID NO: 53574 - DNA, 50 bp, synthetic construct
  source 1..50: mol_type = other DNA
cataaccgaaaaactaccaaatccaactctactaaaaacctccacgaacg

SEQ ID NO: 53575 - DNA, 50 bp, synthetic construct
  source 1..50: mol_type = other DNA
atctctactccaaactctaccctaccccccaaaataatctatttcataca

SEQ ID NO: 53576 - DNA, 50 bp, synthetic construct
  source 1..50: mol_type = other DNA
atctctactccgaactctaccctaccccccaaaataatctatttcatacg

SEQ ID NO: 53577 - DNA, 50 bp, synthetic construct
  source 1..50: mol_type = other DNA
acataacataacaaattattttacttaaaactttaacttaatctaaaaca

SEQ ID NO: 53578 - DNA, 50 bp, synthetic construct
  source 1..50: mol_type = other DNA
acataacataacaaattattttacttaaaactttaacttaatctaaaacg

SEQ ID NO: 53579 - DNA, 50 bp, synthetic construct
  source 1..50: mol_type = other DNA
taccactaaaacacaatataaataactacacttaactaaaaacccccaca

SEQ ID NO: 53580 - DNA, 50 bp, synthetic construct
  source 1..50: mol_type = other DNA
taccgctaaaacgcgatataaataactacacttaactaaaaacccccgcg

SEQ ID NO: 53581 - DNA, 50 bp, synthetic construct
  source 1..50: mol_type = other DNA
actaccactaaaacacaatataaataactacacttaactaaaaaccccca

SEQ ID NO: 53582 - DNA, 50 bp, synthetic construct
  source 1..50: mol_type = other DNA
actaccgctaaaacgcgatataaataactacacttaactaaaaacccccg

SEQ ID NO: 53583 - DNA, 50 bp, synthetic construct
  source 1..50: mol_type = other DNA
taccaaatattcaccaaaacactacaaacctataaaatacactttacaca

SEQ ID NO: 53584 - DNA, 50 bp, synthetic construct
  source 1..50: mol_type = other DNA
taccaaatattcgccgaaacgctacaaacctataaaatacgctttacgcg

SEQ ID NO: 53585 - DNA, 50 bp, synthetic construct
  source 1..50: mol_type = other DNA
tataccaaatattcaccaaaacactacaaacctataaaatacactttaca

SEQ ID NO: 53586 - DNA, 50 bp, synthetic construct
  source 1..50: mol_type = other DNA
tataccaaatattcgccgaaacgctacaaacctataaaatacgctttacg

SEQ ID NO: 53587 - DNA, 50 bp, synthetic construct
  source 1..50: mol_type = other DNA
cctccacaattcataaccattaactaattataaaccattcataacaaaca

SEQ ID NO: 53588 - DNA, 50 bp, synthetic construct
  source 1..50: mol_type = other DNA
cctccacaattcataaccgttaactaattataaaccgttcataacgaacg

SEQ ID NO: 53589 - DNA, 50 bp, synthetic construct
  source 1..50: mol_type = other DNA
taaccatttattataatcattccctttatacaattcacaaccctaacaca

SEQ ID NO: 53590 - DNA, 50 bp, synthetic construct
  source 1..50: mol_type = other DNA
taaccgtttattataatcgttccctttatacgattcgcaaccctaacacg

SEQ ID NO: 53591 - DNA, 50 bp, synthetic construct
  source 1..50: mol_type = other DNA
caatacaaatcatataaaaaccaaaacaaaaaacaaaacccttaaaaaca

SEQ ID NO: 53592 - DNA, 50 bp, synthetic construct
  source 1..50: mol_type = other DNA
cgatacgaatcatataaaaaccaaaacgaaaaacaaaacccttaaaaacg

SEQ ID NO: 53593 - DNA, 50 bp, synthetic construct
  source 1..50: mol_type = other DNA
acacaaaaaccaaatatccaacaactataacatataaaacctacaaacca

SEQ ID NO: 53594 - DNA, 50 bp, synthetic construct
  source 1..50: mol_type = other DNA
acgcaaaaaccgaatatccaacaactataacgtataaaacctacaaaccg

SEQ ID NO: 53595 - DNA, 50 bp, synthetic construct
  source 1..50: mol_type = other DNA
ctttataaaaaacctacccctacatacctaaactaacacaactatatcca

SEQ ID NO: 53596 - DNA, 50 bp, synthetic construct
  source 1..50: mol_type = other DNA
ctttataaaaaacctacccctacgtacctaaactaacgcaactatatccg

SEQ ID NO: 53597 - DNA, 50 bp, synthetic construct
  source 1..50: mol_type = other DNA
ccaaaaccctccataccaaacaatactataaacaccaactaactcaacca

SEQ ID NO: 53598 - DNA, 50 bp, synthetic construct
  source 1..50: mol_type = other DNA
ccaaaaccctccgtaccaaacaatactataaacaccaactaactcaaccg

SEQ ID NO: 53599 - DNA, 50 bp, synthetic construct
  source 1..50: mol_type = other DNA
atatcaccaaaaataaacaacccaactattcaaaaaaaaaacacccccca

SEQ ID NO: 53600 - DNA, 50 bp, synthetic construct
  source 1..50: mol_type = other DNA
atatcaccaaaaataaacaacccaactattcaaaaaaaaaacgccccccg

SEQ ID NO: 53601 - DNA, 50 bp, synthetic construct
  source 1..50: mol_type = other DNA
taaaaaaaaacctcaatttccctttaaacacaaaacaaaacacaaaaaca

SEQ ID NO: 53602 - DNA, 50 bp, synthetic construct
  source 1..50: mol_type = other DNA
taaaaaaaaacctcaatttccctttaaacgcaaaacgaaacgcgaaaacg

SEQ ID NO: 53603 - DNA, 50 bp, synthetic construct
  source 1..50: mol_type = other DNA
tactctactaaaaaaaaacctcaatttccctttaaacacaaaacaaaaca

SEQ ID NO: 53604 - DNA, 50 bp, synthetic construct
  source 1..50: mol_type = other DNA
tactctactaaaaaaaaacctcaatttccctttaaacgcaaaacgaaacg

SEQ ID NO: 53605 - DNA, 50 bp, synthetic construct
  source 1..50: mol_type = other DNA
ttaaataaaaaaaattcacaactacctaactaaatactcaccaaatatca

SEQ ID NO: 53606 - DNA, 50 bp, synthetic construct
  source 1..50: mol_type = other DNA
ttaaataaaaaaaattcacaactacctaactaaatactcaccgaatatcg

SEQ ID NO: 53607 - DNA, 50 bp, synthetic construct
  source 1..50: mol_type = other DNA
acctcaacctctctaataactaaaactataaatatataccaccacaccca

SEQ ID NO: 53608 - DNA, 50 bp, synthetic construct
  source 1..50: mol_type = other DNA
acctcgacctctctaataactaaaactataaatatataccaccacacccg

SEQ ID NO: 53609 - DNA, 50 bp, synthetic construct
  source 1..50: mol_type = other DNA
aatttggtttatttttagttttggtatgagtgggatagagttgtttttat

SEQ ID NO: 53610 - DNA, 50 bp, synthetic construct
  source 1..50: mol_type = other DNA
aatttggtttatttttagttttggtatgagcgggatagagttgtttttac

SEQ ID NO: 53611 - DNA, 50 bp, synthetic construct
  source 1..50: mol_type = other DNA
tccatattcctcaaaaactaaaaaaactcaactcaacccaaacataaaca

SEQ ID NO: 53612 - DNA, 50 bp, synthetic construct
  source 1..50: mol_type = other DNA
tccatattcctcaaaaactaaaaaaactcgactcaacccaaacgtaaacg

SEQ ID NO: 53613 - DNA, 50 bp, synthetic construct
  source 1..50: mol_type = other DNA
acactacacttccctaaacactttacaaaaacccaactaaccacaataca

SEQ ID NO: 53614 - DNA, 50 bp, synthetic construct
  source 1..50: mol_type = other DNA
acactacacttccctaaacactttacgaaaacccaactaaccgcaatacg

SEQ ID NO: 53615 - DNA, 50 bp, synthetic construct
  source 1..50: mol_type = other DNA
cccaataaaaaaaaccaaccaaaaatcaaaaaacccaaaaaaaatttcca

SEQ ID NO: 53616 - DNA, 50 bp, synthetic construct
  source 1..50: mol_type = other DNA
cccgataaaaaaaaccgaccgaaaatcgaaaaacccaaaaaaaatttccg

SEQ ID NO: 53617 - DNA, 50 bp, synthetic construct
  source 1..50: mol_type = other DNA
accaaccaaaaatcaaaaaacccaaaaaaaatttccaatacacatacaca

SEQ ID NO: 53618 - DNA, 50 bp, synthetic construct
  source 1..50: mol_type = other DNA
accgaccgaaaatcgaaaaacccaaaaaaaatttccgatacacatacgcg

SEQ ID NO: 53619 - DNA, 50 bp, synthetic construct
  source 1..50: mol_type = other DNA
aaaatcaaaaaacccaaaaaaaatttccaatacacatacacactaaaaca

SEQ ID NO: 53620 - DNA, 50 bp, synthetic construct
  source 1..50: mol_type = other DNA
aaaatcgaaaaacccaaaaaaaatttccgatacacatacgcgctaaaacg

SEQ ID NO: 53621 - DNA, 50 bp, synthetic construct
  source 1..50: mol_type = other DNA
caaaaaacccaaaaaaaatttccaatacacatacacactaaaacaaatca

SEQ ID NO: 53622 - DNA, 50 bp, synthetic construct
  source 1..50: mol_type = other DNA
cgaaaaacccaaaaaaaatttccgatacacatacgcgctaaaacgaatcg

SEQ ID NO: 53623 - DNA, 50 bp, synthetic construct
  source 1..50: mol_type = other DNA
ccacaaaaacccaaataaataaattaaaaaacatacaaacaaaaaaccca

SEQ ID NO: 53624 - DNA, 50 bp, synthetic construct
  source 1..50: mol_type = other DNA
ccgcgaaaacccgaataaataaattaaaaaacgtacgaacgaaaaacccg

SEQ ID NO: 53625 - DNA, 50 bp, synthetic construct
  source 1..50: mol_type = other DNA
caccaaaccaaaaaaccaaaatccttttcatcattaaaaattaaaaaaca

SEQ ID NO: 53626 - DNA, 50 bp, synthetic construct
  source 1..50: mol_type = other DNA
cgccgaaccaaaaaaccgaaatccttttcgtcgttaaaaattaaaaaacg

SEQ ID NO: 53627 - DNA, 50 bp, synthetic construct
  source 1..50: mol_type = other DNA
ttctttcaactcttaaaaaatcaaactcaacaacaaaaaacccaaaaaca

SEQ ID NO: 53628 - DNA, 50 bp, synthetic construct
  source 1..50: mol_type = other DNA
ttctttcaactcttaaaaaatcgaactcgacaacgaaaaacccgaaaacg

SEQ ID NO: 53629 - DNA, 50 bp, synthetic construct
  source 1..50: mol_type = other DNA
ttcaactcttaaaaaatcaaactcaacaacaaaaaacccaaaaacaaaca

SEQ ID NO: 53630 - DNA, 50 bp, synthetic construct
  source 1..50: mol_type = other DNA
ttcaactcttaaaaaatcgaactcgacaacgaaaaacccgaaaacgaacg

SEQ ID NO: 53631 - DNA, 50 bp, synthetic construct
  source 1..50: mol_type = other DNA
acacaaaaataacaaatcaaaaaataattcatatcacacaacaacaaaca

SEQ ID NO: 53632 - DNA, 50 bp, synthetic construct
  source 1..50: mol_type = other DNA
acgcgaaaataacgaatcgaaaaataattcgtatcgcgcaacgacaaacg

SEQ ID NO: 53633 - DNA, 50 bp, synthetic construct
  source 1..50: mol_type = other DNA
aaatcaaaaaataattcatatcacacaacaacaaacaatataaactatca

SEQ ID NO: 53634 - DNA, 50 bp, synthetic construct
  source 1..50: mol_type = other DNA
gaatcgaaaaataattcgtatcgcgcaacgacaaacgatataaactatcg

SEQ ID NO: 53635 - DNA, 50 bp, synthetic construct
  source 1..50: mol_type = other DNA
tcaaaaaataattcatatcacacaacaacaaacaatataaactatcacca

SEQ ID NO: 53636 - DNA, 50 bp, synthetic construct
  source 1..50: mol_type = other DNA
tcgaaaaataattcgtatcgcgcaacgacaaacgatataaactatcgccg

SEQ ID NO: 53637 - DNA, 50 bp, synthetic construct
  source 1..50: mol_type = other DNA
caaaaaaatacaaattattaactaaaacaaaccataactcaaacaacaca

SEQ ID NO: 53638 - DNA, 50 bp, synthetic construct
  source 1..50: mol_type = other DNA
cgaaaaaatacgaattattaactaaaacaaaccgtaactcgaacgacgcg

SEQ ID NO: 53639 - DNA, 50 bp, synthetic construct
  source 1..50: mol_type = other DNA
aaacacaaaaaaatacaaattattaactaaaacaaaccataactcaaaca

SEQ ID NO: 53640 - DNA, 50 bp, synthetic construct
  source 1..50: mol_type = other DNA
aaacgcgaaaaaatacgaattattaactaaaacaaaccgtaactcgaacg

SEQ ID NO: 53641 - DNA, 50 bp, synthetic construct
  source 1..50: mol_type = other DNA
accaaaacacaaaaaaatacaaattattaactaaaacaaaccataactca

SEQ ID NO: 53642 - DNA, 50 bp, synthetic construct
  source 1..50: mol_type = other DNA
accgaaacgcgaaaaaatacgaattattaactaaaacaaaccgtaactcg

SEQ ID NO: 53643 - DNA, 50 bp, synthetic construct
  source 1..50: mol_type = other DNA
acttcaaaccaaaacacaaaaaaatacaaattattaactaaaacaaacca

SEQ ID NO: 53644 - DNA, 50 bp, synthetic construct
  source 1..50: mol_type = other DNA
acttcgaaccgaaacgcgaaaaaatacgaattattaactaaaacaaaccg

SEQ ID NO: 53645 - DNA, 50 bp, synthetic construct
  source 1..50: mol_type = other DNA
aaacttttcattaactttactcacttcaaaccaaaacacaaaaaaataca

SEQ ID NO: 53646 - DNA, 50 bp, synthetic construct
  source 1..50: mol_type = other DNA
aaacttttcattaactttactcacttcgaaccgaaacgcgaaaaaatacg

SEQ ID NO: 53647 - DNA, 50 bp, synthetic construct
  source 1..50: mol_type = other DNA
cacaaaataccaacaaactaaaacacaaaactaactaaaaaataatccca

SEQ ID NO: 53648 - DNA, 50 bp, synthetic construct
  source 1..50: mol_type = other DNA
cgcgaaataccaacgaactaaaacgcgaaactaactaaaaaataatcccg

SEQ ID NO: 53649 - DNA, 50 bp, synthetic construct
  source 1..50: mol_type = other DNA
acacaaaaaaacacaaaaactactccacaaaataccaacaaactaaaaca

SEQ ID NO: 53650 - DNA, 50 bp, synthetic construct
  source 1..50: mol_type = other DNA
acacaaaaaaacacaaaaactactccgcgaaataccaacgaactaaaacg

SEQ ID NO: 53651 - DNA, 50 bp, synthetic construct
  source 1..50: mol_type = other DNA
cactctaaacttatacacatcatataaaatattctcccaaaaacactcca

SEQ ID NO: 53652 - DNA, 50 bp, synthetic construct
  source 1..50: mol_type = other DNA
cactctaaacttatacgcgtcgtataaaatattctcccaaaaacgctccg

SEQ ID NO: 53653 - DNA, 50 bp, synthetic construct
  source 1..50: mol_type = other DNA
cataaactccaaaacaaatacaaaacaaacaactcaacaaaaaatttcca

SEQ ID NO: 53654 - DNA, 50 bp, synthetic construct
  source 1..50: mol_type = other DNA
cataaactccgaaacaaatacaaaacgaacgactcaacgaaaaatttccg

SEQ ID NO: 53655 - DNA, 50 bp, synthetic construct
  source 1..50: mol_type = other DNA
aaaaactcatacctacccaaaacaaatccaaaatatttccaaaacccaca

SEQ ID NO: 53656 - DNA, 50 bp, synthetic construct
  source 1..50: mol_type = other DNA
aaaaactcatacctacccgaaacgaatccgaaatatttccaaaacccgcg

SEQ ID NO: 53657 - DNA, 50 bp, synthetic construct
  source 1..50: mol_type = other DNA
caaaaaactcatacctacccaaaacaaatccaaaatatttccaaaaccca

SEQ ID NO: 53658 - DNA, 50 bp, synthetic construct
  source 1..50: mol_type = other DNA
cgaaaaactcatacctacccgaaacgaatccgaaatatttccaaaacccg

SEQ ID NO: 53659 - DNA, 50 bp, synthetic construct
  source 1..50: mol_type = other DNA
aaacataaatcttccaaacaccttataattcctcaaaaaactcaacatca

SEQ ID NO: 53660 - DNA, 50 bp, synthetic construct
  source 1..50: mol_type = other DNA
aaacataaatcttccgaacgccttataattcctcgaaaaactcaacgtcg

SEQ ID NO: 53661 - DNA, 50 bp, synthetic construct
  source 1..50: mol_type = other DNA
ccaactcttatttactctttctaaccaacaaccccaatataaaacacaca

SEQ ID NO: 53662 - DNA, 50 bp, synthetic construct
  source 1..50: mol_type = other DNA
ccaactcttatttactctttctaaccaacgaccccaatataaaacacgcg

SEQ ID NO: 53663 - DNA, 50 bp, synthetic construct
  source 1..50: mol_type = other DNA
aacaaccccaatataaaacacacaaaaaaaccccacatttcttctaatca

SEQ ID NO: 53664 - DNA, 50 bp, synthetic construct
  source 1..50: mol_type = other DNA
aacgaccccaatataaaacacgcgaaaaaaccccacatttcttctaatcg

SEQ ID NO: 53665 - DNA, 50 bp, synthetic construct
  source 1..50: mol_type = other DNA
aacaaaaaaataccaaactaaaaaacaaactccaccaaaacaaaaaaaca

SEQ ID NO: 53666 - DNA, 50 bp, synthetic construct
  source 1..50: mol_type = other DNA
aacaaaaaaataccgaactaaaaaacaaactccaccgaaacaaaaaaacg

SEQ ID NO: 53667 - DNA, 50 bp, synthetic construct
  source 1..50: mol_type = other DNA
actaacacacaaaacaaataatccctaaaaatacccccaaaattacaaca

SEQ ID NO: 53668 - DNA, 50 bp, synthetic construct
  source 1..50: mol_type = other DNA
gctaacgcacaaaacaaataatccctaaaaatacccccgaaattacgacg

SEQ ID NO: 53669 - DNA, 50 bp, synthetic construct
  source 1..50: mol_type = other DNA
ctcactaacacacaaaacaaataatccctaaaaatacccccaaaattaca

SEQ ID NO: 53670 - DNA, 50 bp, synthetic construct
  source 1..50: mol_type = other DNA
ctcgctaacgcacaaaacaaataatccctaaaaatacccccgaaattacg

SEQ ID NO: 53671 - DNA, 50 bp, synthetic construct
  source 1..50: mol_type = other DNA
acaaacatatacaaaaaaaaacatatatataacactatcactcactaaca

SEQ ID NO: 53672 - DNA, 50 bp, synthetic construct
  source 1..50: mol_type = other DNA
acgaacatatacgaaaaaaaacgtatatataacgctatcactcgctaacg

SEQ ID NO: 53673 - DNA, 50 bp, synthetic construct
  source 1..50: mol_type = other DNA
aatacaacaaacatatacaaaaaaaaacatatatataacactatcactca

SEQ ID NO: 53674 - DNA, 50 bp, synthetic construct
  source 1..50: mol_type = other DNA
aatacaacgaacatatacgaaaaaaaacgtatatataacgctatcactcg

SEQ ID NO: 53675 - DNA, 50 bp, synthetic construct
  source 1..50: mol_type = other DNA
ccaaaaactacttaccttatacatcaacaaataacaacatcacacacaca

SEQ ID NO: 53676 - DNA, 50 bp, synthetic construct
  source 1..50: mol_type = other DNA
ccaaaaactacttaccttatacgtcaacgaataacaacgtcacacacacg

SEQ ID NO: 53677 - DNA, 50 bp, synthetic construct
  source 1..50: mol_type = other DNA
aaaatactatatattaaaaaaaaatcatactactctaacaattcttccca

SEQ ID NO: 53678 - DNA, 50 bp, synthetic construct
  source 1..50: mol_type = other DNA
aaaatactatatattaaaaaaaaatcatactactctaacgattcttcccg

SEQ ID NO: 53679 - DNA, 50 bp, synthetic construct
  source 1..50: mol_type = other DNA
atcatactactctaacaattcttcccattaaaaactaaaaaaatacaaca

SEQ ID NO: 53680 - DNA, 50 bp, synthetic construct
  source 1..50: mol_type = other DNA
atcatactactctaacgattcttcccgttaaaaactaaaaaaatacaacg

SEQ ID NO: 53681 - DNA, 50 bp, synthetic construct
  source 1..50: mol_type = other DNA
acactaaatactacactttaaccaaaaacccctctaactccccactacca

SEQ ID NO: 53682 - DNA, 50 bp, synthetic construct
  source 1..50: mol_type = other DNA
acactaaatactacactttaaccaaaaacccctctaactccccactaccg

SEQ ID NO: 53683 - DNA, 50 bp, synthetic construct
  source 1..50: mol_type = other DNA
ttccatattcccttacaaccacaaaataaaaaaatacctaaacaaaacca

SEQ ID NO: 53684 - DNA, 50 bp, synthetic construct
  source 1..50: mol_type = other DNA
ttccgtattcccttacaaccacaaaataaaaaaatacctaaacaaaaccg

SEQ ID NO: 53685 - DNA, 50 bp, synthetic construct
  source 1..50: mol_type = other DNA
caaaatttacatcattacaacccataaaattcctattataaaaaataaca

SEQ ID NO: 53686 - DNA, 50 bp, synthetic construct
  source 1..50: mol_type = other DNA
cgaaatttacgtcgttacgacccgtaaaattcctattataaaaaataacg

SEQ ID NO: 53687 - DNA, 50 bp, synthetic construct
  source 1..50: mol_type = other DNA
taaaaacataacaaaaacataaatctcaaaatttacatcattacaaccca

SEQ ID NO: 53688 - DNA, 50 bp, synthetic construct
  source 1..50: mol_type = other DNA
taaaaacgtaacaaaaacataaatctcgaaatttacgtcgttacgacccg

SEQ ID NO: 53689 - DNA, 50 bp, synthetic construct
  source 1..50: mol_type = other DNA
acctctaaaaacataacaaaaacataaatctcaaaatttacatcattaca

SEQ ID NO: 53690 - DNA, 50 bp, synthetic construct
  source 1..50: mol_type = other DNA
acctctaaaaacgtaacaaaaacataaatctcgaaatttacgtcgttacg

SEQ ID NO: 53691 - DNA, 50 bp, synthetic construct
  source 1..50: mol_type = other DNA
caaaacccatacctttatcacatccccaaaaataaaactacccaactaca

SEQ ID NO: 53692 - DNA, 50 bp, synthetic construct
  source 1..50: mol_type = other DNA
cgaaacccatacctttatcacgtccccaaaaataaaactacccaactacg

SEQ ID NO: 53693 - DNA, 50 bp, synthetic construct
  source 1..50: mol_type = other DNA
tatcacaaccctaaccattacaaaaaccctcaaattcaacccaaaaacca

SEQ ID NO: 53694 - DNA, 50 bp, synthetic construct
  source 1..50: mol_type = other DNA
tatcacaaccctaaccattacgaaaaccctcaaattcaacccaaaaaccg

SEQ ID NO: 53695 - DNA, 50 bp, synthetic construct
  source 1..50: mol_type = other DNA
taaccattacaaaaaccctcaaattcaacccaaaaaccaactacctaaca

SEQ ID NO: 53696 - DNA, 50 bp, synthetic construct
  source 1..50: mol_type = other DNA
taaccattacgaaaaccctcaaattcaacccaaaaaccgactacctaacg

SEQ ID NO: 53697 - DNA, 50 bp, synthetic construct
  source 1..50: mol_type = other DNA
ccaactacctaacaaacacaaataacaaaaaattcaaactaaaaactcca

SEQ ID NO: 53698 - DNA, 50 bp, synthetic construct
  source 1..50: mol_type = other DNA
ccgactacctaacgaacacgaataacaaaaaattcaaactaaaaactccg

SEQ ID NO: 53699 - DNA, 50 bp, synthetic construct
  source 1..50: mol_type = other DNA
ccaaaaactacaaacactaactaataaaactcacatccacatactaccca

SEQ ID NO: 53700 - DNA, 50 bp, synthetic construct
  source 1..50: mol_type = other DNA
ccaaaaactacaaacgctaactaataaaactcacgtccacatactacccg

SEQ ID NO: 53701 - DNA, 50 bp, synthetic construct
  source 1..50: mol_type = other DNA
ctcctttcacaataaaaaaaaattctaaaacattaaactacttacccaca

SEQ ID NO: 53702 - DNA, 50 bp, synthetic construct
  source 1..50: mol_type = other DNA
ctcctttcacgataaaaaaaaattctaaaacattaaactacttacccacg

SEQ ID NO: 53703 - DNA, 50 bp, synthetic construct
  source 1..50: mol_type = other DNA
aatactaaacccacaactcacaaacaaaccttaacataaaaaaacaaaca

SEQ ID NO: 53704 - DNA, 50 bp, synthetic construct
  source 1..50: mol_type = other DNA
aatactaaacccacgactcgcgaacaaaccttaacgtaaaaaaacgaacg

SEQ ID NO: 53705 - DNA, 50 bp, synthetic construct
  source 1..50: mol_type = other DNA
acaaaatactaaacccacaactcacaaacaaaccttaacataaaaaaaca

SEQ ID NO: 53706 - DNA, 50 bp, synthetic construct
  source 1..50: mol_type = other DNA
acaaaatactaaacccacgactcgcgaacaaaccttaacgtaaaaaaacg

SEQ ID NO: 53707 - DNA, 50 bp, synthetic construct
  source 1..50: mol_type = other DNA
aaaaactaaacaaaaaattaaccaacaaaatactaaacccacaactcaca

SEQ ID NO: 53708 - DNA, 50 bp, synthetic construct
  source 1..50: mol_type = other DNA
aaaaactaaacaaaaaattaaccaacaaaatactaaacccacgactcgcg

SEQ ID NO: 53709 - DNA, 50 bp, synthetic construct
  source 1..50: mol_type = other DNA
caaaccataaacccaataccttattaaccaacttcttattcaactcctca

SEQ ID NO: 53710 - DNA, 50 bp, synthetic construct
  source 1..50: mol_type = other DNA
cgaaccgtaaacccaataccttattaaccaacttcttattcaactcctcg

SEQ ID NO: 53711 - DNA, 50 bp, synthetic construct
  source 1..50: mol_type = other DNA
tcaacaataaaatcattaaacttcctctcaaactaccaaaaaaaaatcca

SEQ ID NO: 53712 - DNA, 50 bp, synthetic construct
  source 1..50: mol_type = other DNA
tcgacaataaaatcgttaaacttcctctcaaactaccaaaaaaaaatccg

SEQ ID NO: 53713 - DNA, 50 bp, synthetic construct
  source 1..50: mol_type = other DNA
acccccaacacaaaccaaaatattcatcctaataaaaataataaacacca

SEQ ID NO: 53714 - DNA, 50 bp, synthetic construct
  source 1..50: mol_type = other DNA
acccccaacgcaaaccgaaatattcgtcctaataaaaataataaacaccg

SEQ ID NO: 53715 - DNA, 50 bp, synthetic construct
  source 1..50: mol_type = other DNA
tcaatttcctcatattataataacaaaacataacccaaaccaaaccccca

SEQ ID NO: 53716 - DNA, 50 bp, synthetic construct
  source 1..50: mol_type = other DNA
tcaatttcctcatattataataacgaaacataacccgaaccgaacccccg

SEQ ID NO: 53717 - DNA, 50 bp, synthetic construct
  source 1..50: mol_type = other DNA
ataacataacataaaataacataacataacaaaatctcacaacacaaaca

SEQ ID NO: 53718 - DNA, 50 bp, synthetic construct
  source 1..50: mol_type = other DNA
ataacgtaacgtaaaataacgtaacgtaacgaaatctcgcgacgcgaacg

SEQ ID NO: 53719 - DNA, 50 bp, synthetic construct
  source 1..50: mol_type = other DNA
taaaataacataacataaaataacataacataacaaaatctcacaacaca

SEQ ID NO: 53720 - DNA, 50 bp, synthetic construct
  source 1..50: mol_type = other DNA
taaaataacgtaacgtaaaataacgtaacgtaacgaaatctcgcgacgcg

SEQ ID NO: 53721 - DNA, 50 bp, synthetic construct
  source 1..50: mol_type = other DNA
cataaaataacataacataaaataacataacataacaaaatctcacaaca

SEQ ID NO: 53722 - DNA, 50 bp, synthetic construct
  source 1..50: mol_type = other DNA
cgtaaaataacgtaacgtaaaataacgtaacgtaacgaaatctcgcgacg

SEQ ID NO: 53723 - DNA, 50 bp, synthetic construct
  source 1..50: mol_type = other DNA
aaacataaaataacataacataaaataacataacataacaaaatctcaca

SEQ ID NO: 53724 - DNA, 50 bp, synthetic construct
  source 1..50: mol_type = other DNA
aaacgtaaaataacgtaacgtaaaataacgtaacgtaacgaaatctcgcg

SEQ ID NO: 53725 - DNA, 50 bp, synthetic construct
  source 1..50: mol_type = other DNA
caaaacataaaataacataacataaaataacataacataacaaaatctca

SEQ ID NO: 53726 - DNA, 50 bp, synthetic construct
  source 1..50: mol_type = other DNA
cgaaacgtaaaataacgtaacgtaaaataacgtaacgtaacgaaatctcg

SEQ ID NO: 53727 - DNA, 50 bp, synthetic construct
  source 1..50: mol_type = other DNA
atacacaatacataatacataatacataatacaaacaacaacacataaca

SEQ ID NO: 53728 - DNA, 50 bp, synthetic construct
  source 1..50: mol_type = other DNA
atacgcgatacgtaatacgtaatacgtaatacgaacgacgacacgtaacg

SEQ ID NO: 53729 - DNA, 50 bp, synthetic construct
  source 1..50: mol_type = other DNA
ttaataaattttccaaaaacaataaattcaaaatctcacccacaatcaca

SEQ ID NO: 53730 - DNA, 50 bp, synthetic construct
  source 1..50: mol_type = other DNA
ttaataaattttccgaaaacgataaattcgaaatctcgcccgcaatcgcg

SEQ ID NO: 53731 - DNA, 50 bp, synthetic construct
  source 1..50: mol_type = other DNA
atacaaataaaacacaaaccaaacaaaaaataatcaaacaaaattacaca

SEQ ID NO: 53732 - DNA, 50 bp, synthetic construct
  source 1..50: mol_type = other DNA
atacgaataaaacacaaaccaaacgaaaaataatcaaacgaaattacacg

SEQ ID NO: 53733 - DNA, 50 bp, synthetic construct
  source 1..50: mol_type = other DNA
accatattactcacacaaatcctatttaataatctcttcacacaaacaca

SEQ ID NO: 53734 - DNA, 50 bp, synthetic construct
  source 1..50: mol_type = other DNA
accatattactcacacaaatcctatttaataatctcttcacacgaacgcg

SEQ ID NO: 53735 - DNA, 50 bp, synthetic construct
  source 1..50: mol_type = other DNA
aacaactaaaaaactaaaaaaatcatccaaaaaaactacccaaaatacca

SEQ ID NO: 53736 - DNA, 50 bp, synthetic construct
  source 1..50: mol_type = other DNA
aacaactaaaaaactaaaaaaatcatccgaaaaaactacccaaaataccg

SEQ ID NO: 53737 - DNA, 50 bp, synthetic construct
  source 1..50: mol_type = other DNA
aaaaaaccccaacactactataaaaaacaccaaaactaaaactaaacaca

SEQ ID NO: 53738 - DNA, 50 bp, synthetic construct
  source 1..50: mol_type = other DNA
aaaaaaccccgacgctactataaaaaacgccgaaactaaaactaaacacg

SEQ ID NO: 53739 - DNA, 50 bp, synthetic construct
  source 1..50: mol_type = other DNA
cactacaacctcaaaacaaaaaacactaacaacaactataaaaaacccca

SEQ ID NO: 53740 - DNA, 50 bp, synthetic construct
  source 1..50: mol_type = other DNA
cgctacgacctcaaaacaaaaaacgctaacaacaactataaaaaaccccg

SEQ ID NO: 53741 - DNA, 50 bp, synthetic construct
  source 1..50: mol_type = other DNA
taaaaataccaaatcccaaaaaaccaaactaacaaaaaaactaacaaaca

SEQ ID NO: 53742 - DNA, 50 bp, synthetic construct
  source 1..50: mol_type = other DNA
taaaaataccgaatcccgaaaaaccgaactaacgaaaaaactaacgaacg

SEQ ID NO: 53743 - DNA, 50 bp, synthetic construct
  source 1..50: mol_type = other DNA
aataataaaaacaataaacattatactacaaacaactccaaacccacaca

SEQ ID NO: 53744 - DNA, 50 bp, synthetic construct
  source 1..50: mol_type = other DNA
aataataaaaacgataaacgttatactacgaacaactccaaacccgcacg

SEQ ID NO: 53745 - DNA, 50 bp, synthetic construct
  source 1..50: mol_type = other DNA
caaatttcctaaaaataacaaataaaaccacaaacaccctaacatcaaca

SEQ ID NO: 53746 - DNA, 50 bp, synthetic construct
  source 1..50: mol_type = other DNA
caaatttcctaaaaataacgaataaaaccacgaacgccctaacatcgacg

SEQ ID NO: 53747 - DNA, 50 bp, synthetic construct
  source 1..50: mol_type = other DNA
atactatccccaaccatacaaaaaaaactccaaaaaaacaacaacaccca

SEQ ID NO: 53748 - DNA, 50 bp, synthetic construct
  source 1..50: mol_type = other DNA
atactatccccaaccatacgaaaaaaactccgaaaaaacaacgacacccg

SEQ ID NO: 53749 - DNA, 50 bp, synthetic construct
  source 1..50: mol_type = other DNA
ccaatctcttctcacatatacccctaaaaaactctaccttaacacataca

SEQ ID NO: 53750 - DNA, 50 bp, synthetic construct
  source 1..50: mol_type = other DNA
ccaatctcttctcacgtatacccctaaaaaactctaccttaacgcatacg

SEQ ID NO: 53751 - DNA, 50 bp, synthetic construct
  source 1..50: mol_type = other DNA
aaaaactccaaaacacaaaaaattactcacaaacatctataaaaacaaca

SEQ ID NO: 53752 - DNA, 50 bp, synthetic construct
  source 1..50: mol_type = other DNA
aaaaactccgaaacgcgaaaaattactcgcgaacgtctataaaaacaacg

SEQ ID NO: 53753 - DNA, 50 bp, synthetic construct
  source 1..50: mol_type = other DNA
aaaaattctctatctctccataacaatcacaaatccccaacttcctaaca

SEQ ID NO: 53754 - DNA, 50 bp, synthetic construct
  source 1..50: mol_type = other DNA
aaaaattctctatctctccgtaacgatcacgaatccccaacttcctaacg

SEQ ID NO: 53755 - DNA, 50 bp, synthetic construct
  source 1..50: mol_type = other DNA
aaaaacaaaaactaaactaaataaaacaaacaacaacaaaacccaaacca

SEQ ID NO: 53756 - DNA, 50 bp, synthetic construct
  source 1..50: mol_type = other DNA
aaaaacgaaaactaaactaaataaaacgaacgacgacgaaacccgaaccg

SEQ ID NO: 53757 - DNA, 50 bp, synthetic construct
  source 1..50: mol_type = other DNA
aaaaaaacaaaaccaacaaaaaaacctactactaaaaaaacaacaaccca

SEQ ID NO: 53758 - DNA, 50 bp, synthetic construct
  source 1..50: mol_type = other DNA
aaaaaaacgaaaccgacaaaaaaacctactactaaaaaaacaacgacccg

SEQ ID NO: 53759 - DNA, 50 bp, synthetic construct
  source 1..50: mol_type = other DNA
accaacatcctttccacaaaaaaatccactaaaaaataccaaaaatccca

SEQ ID NO: 53760 - DNA, 50 bp, synthetic construct
  source 1..50: mol_type = other DNA
gccaacatcctttccgcaaaaaaatccactaaaaaataccgaaaatcccg

SEQ ID NO: 53761 - DNA, 50 bp, synthetic construct
  source 1..50: mol_type = other DNA
aaatataaaaaccaaataaaaccccccaccaacaaaaacaaaacacaaca

SEQ ID NO: 53762 - DNA, 50 bp, synthetic construct
  source 1..50: mol_type = other DNA
aaatataaaaaccaaataaaaccccccgccaacgaaaacgaaacacaacg

SEQ ID NO: 53763 - DNA, 50 bp, synthetic construct
  source 1..50: mol_type = other DNA
acaacaacaaaaatataaaaaccaaataaaaccccccaccaacaaaaaca

SEQ ID NO: 53764 - DNA, 50 bp, synthetic construct
  source 1..50: mol_type = other DNA
acgacaacgaaaatataaaaaccaaataaaaccccccgccaacgaaaacg

SEQ ID NO: 53765 - DNA, 50 bp, synthetic construct
  source 1..50: mol_type = other DNA
caccaaaccatctaaaacacttaaaacacatcataataaaactaaaaaca

SEQ ID NO: 53766 - DNA, 50 bp, synthetic construct
  source 1..50: mol_type = other DNA
cgccgaaccgtctaaaacgcttaaaacgcgtcataataaaactaaaaacg

SEQ ID NO: 53767 - DNA, 50 bp, synthetic construct
  source 1..50: mol_type = other DNA
atctaaaacacttaaaacacatcataataaaactaaaaacactactacca

SEQ ID NO: 53768 - DNA, 50 bp, synthetic construct
  source 1..50: mol_type = other DNA
gtctaaaacgcttaaaacgcgtcataataaaactaaaaacgctactaccg

SEQ ID NO: 53769 - DNA, 50 bp, synthetic construct
  source 1..50: mol_type = other DNA
cctcccaaaacaatccccaaaaataccaaaatataaatacctaaaaacca

SEQ ID NO: 53770 - DNA, 50 bp, synthetic construct
  source 1..50: mol_type = other DNA
cctcccgaaacgatccccgaaaataccgaaatataaatacctaaaaaccg

SEQ ID NO: 53771 - DNA, 50 bp, synthetic construct
  source 1..50: mol_type = other DNA
aaaatataaatacctaaaaaccacccaccaatactacacaaattaataca

SEQ ID NO: 53772 - DNA, 50 bp, synthetic construct
  source 1..50: mol_type = other DNA
gaaatataaatacctaaaaaccgcccgccgatactacgcgaattaatacg

SEQ ID NO: 53773 - DNA, 50 bp, synthetic construct
  source 1..50: mol_type = other DNA
aatataaatacctaaaaaccacccaccaatactacacaaattaatacaca

SEQ ID NO: 53774 - DNA, 50 bp, synthetic construct
  source 1..50: mol_type = other DNA
aatataaatacctaaaaaccgcccgccgatactacgcgaattaatacgcg

SEQ ID NO: 53775 - DNA, 50 bp, synthetic construct
  source 1..50: mol_type = other DNA
taacacactaaataatcacaaaaaaaaacccaaccatcatataaaaccca

SEQ ID NO: 53776 - DNA, 50 bp, synthetic construct
  source 1..50: mol_type = other DNA
taacgcgctaaataatcgcaaaaaaaaacccaaccgtcgtataaaacccg

SEQ ID NO: 53777 - DNA, 50 bp, synthetic construct
  source 1..50: mol_type = other DNA
acccaaaaaataccctcaaaaatctcataacacaccacaaaatcaaaaca

SEQ ID NO: 53778 - DNA, 50 bp, synthetic construct
  source 1..50: mol_type = other DNA
acccaaaaaataccctcaaaaatctcataacgcaccacgaaatcgaaacg

SEQ ID NO: 53779 - DNA, 50 bp, synthetic construct
  source 1..50: mol_type = other DNA
taaatataaaaacaaatacaatccaaaacaaaactatataattacaacca

SEQ ID NO: 53780 - DNA, 50 bp, synthetic construct
  source 1..50: mol_type = other DNA
taaatataaaaacgaatacgatccgaaacaaaactatataattacgaccg

SEQ ID NO: 53781 - DNA, 50 bp, synthetic construct
  source 1..50: mol_type = other DNA
atacactataaaacccctaaaaacactttctaaaccaacaaccacaacca

SEQ ID NO: 53782 - DNA, 50 bp, synthetic construct
  source 1..50: mol_type = other DNA
atacgctataaaacccctaaaaacactttctaaaccaacaaccacgaccg

SEQ ID NO: 53783 - DNA, 50 bp, synthetic construct
  source 1..50: mol_type = other DNA
caaactataactccaactacaacaactactactactaaaacaacccttca

SEQ ID NO: 53784 - DNA, 50 bp, synthetic construct
  source 1..50: mol_type = other DNA
cgaactataactccaactacgacaactactactactaaaacaacccttcg

SEQ ID NO: 53785 - DNA, 50 bp, synthetic construct
  source 1..50: mol_type = other DNA
actacataaaaccaataaaacacaaataatatcaaccaacaccacctcca

SEQ ID NO: 53786 - DNA, 50 bp, synthetic construct
  source 1..50: mol_type = other DNA
actacataaaaccgataaaacgcaaataatatcaaccaacgccacctccg

SEQ ID NO: 53787 - DNA, 50 bp, synthetic construct
  source 1..50: mol_type = other DNA
aactatattattatatataatcaaaacaaacacccacaacccacaaaaca

SEQ ID NO: 53788 - DNA, 50 bp, synthetic construct
  source 1..50: mol_type = other DNA
aactatattattatatataatcaaaacaaacgcccgcgacccgcgaaacg

SEQ ID NO: 53789 - DNA, 50 bp, synthetic construct
  source 1..50: mol_type = other DNA
ttttaaaaaatcaatccctccttaattacccacctcaactaaaaccacca

SEQ ID NO: 53790 - DNA, 50 bp, synthetic construct
  source 1..50: mol_type = other DNA
ttttaaaaaatcaatccctccttaattacccgcctcaactaaaaccgccg

SEQ ID NO: 53791 - DNA, 50 bp, synthetic construct
  source 1..50: mol_type = other DNA
aaccaactaaaccaaaaccttaaaactaaactaaaataaaaataactaca

SEQ ID NO: 53792 - DNA, 50 bp, synthetic construct
  source 1..50: mol_type = other DNA
aaccgactaaaccaaaaccttaaaactaaactaaaataaaaataactacg

SEQ ID NO: 53793 - DNA, 50 bp, synthetic construct
  source 1..50: mol_type = other DNA
tccccaaatccttaataaaaaaatttccaaaaaactcaaacacaccccca

SEQ ID NO: 53794 - DNA, 50 bp, synthetic construct
  source 1..50: mol_type = other DNA
tccccaaatccttaataaaaaaatttccaaaaaactcgaacgcgcccccg

SEQ ID NO: 53795 - DNA, 50 bp, synthetic construct
  source 1..50: mol_type = other DNA
taacatttcccaaaaaacccaacaccaaaaaaaaatttacaactactcca

SEQ ID NO: 53796 - DNA, 50 bp, synthetic construct
  source 1..50: mol_type = other DNA
taacgtttcccaaaaaacccaacgccgaaaaaaaatttacaactactccg

SEQ ID NO: 53797 - DNA, 50 bp, synthetic construct
  source 1..50: mol_type = other DNA
aaatacaatacaaatcaactaaacaattaaaacacaaaatttacacaaca

SEQ ID NO: 53798 - DNA, 50 bp, synthetic construct
  source 1..50: mol_type = other DNA
aaatacgatacaaatcgactaaacgattaaaacgcaaaatttacacgacg

SEQ ID NO: 53799 - DNA, 50 bp, synthetic construct
  source 1..50: mol_type = other DNA
ccttttaaaacccaaaacccatcaaaaataacccacaaaaaccaaaaaca

SEQ ID NO: 53800 - DNA, 50 bp, synthetic construct
  source 1..50: mol_type = other DNA
ccttttaaaacccgaaacccatcaaaaataacccacaaaaaccgaaaacg

SEQ ID NO: 53801 - DNA, 50 bp, synthetic construct
  source 1..50: mol_type = other DNA
aaaatccaaacctcaaacatcttcaaaccacaaataaataaaaaataaca

SEQ ID NO: 53802 - DNA, 50 bp, synthetic construct
  source 1..50: mol_type = other DNA
aaaatccgaacctcaaacatcttcaaaccgcaaataaataaaaaataacg

SEQ ID NO: 53803 - DNA, 50 bp, synthetic construct
  source 1..50: mol_type = other DNA
tccaaacctcaaacatcttcaaaccacaaataaataaaaaataacaccca

SEQ ID NO: 53804 - DNA, 50 bp, synthetic construct
  source 1..50: mol_type = other DNA
tccgaacctcaaacatcttcaaaccgcaaataaataaaaaataacgcccg

SEQ ID NO: 53805 - DNA, 50 bp, synthetic construct
  source 1..50: mol_type = other DNA
accaaacctaccccaaaaataaaaaaatccaactaaaacaacctaaacca

SEQ ID NO: 53806 - DNA, 50 bp, synthetic construct
  source 1..50: mol_type = other DNA
accaaacctaccccgaaaataaaaaaatccgactaaaacgacctaaaccg

SEQ ID NO: 53807 - DNA, 50 bp, synthetic construct
  source 1..50: mol_type = other DNA
tatatatatcaatccactatattccccttatcccatcataccacaaaaca

SEQ ID NO: 53808 - DNA, 50 bp, synthetic construct
  source 1..50: mol_type = other DNA
tatatatatcaatccgctatattccccttatcccgtcataccacgaaacg

SEQ ID NO: 53809 - DNA, 50 bp, synthetic construct
  source 1..50: mol_type = other DNA
aaaaaacaattccaccaaacaaataaatacacttacctaccctacaacca

SEQ ID NO: 53810 - DNA, 50 bp, synthetic construct
  source 1..50: mol_type = other DNA
aaaaaacaattccgccaaacgaataaatacgcttacctaccctacgaccg

SEQ ID NO: 53811 - DNA, 50 bp, synthetic construct
  source 1..50: mol_type = other DNA
aaaaaaaatataaaccacacaaaaactaacaataacactaactctaaaca

SEQ ID NO: 53812 - DNA, 50 bp, synthetic construct
  source 1..50: mol_type = other DNA
aaaaaaaatataaaccacgcaaaaactaacgataacgctaactctaaacg

SEQ ID NO: 53813 - DNA, 50 bp, synthetic construct
  source 1..50: mol_type = other DNA
actccaacttaacttcaaaaacacaaaacatacaaacaaaatacccacca

SEQ ID NO: 53814 - DNA, 50 bp, synthetic construct
  source 1..50: mol_type = other DNA
actccgacttaacttcgaaaacgcaaaacatacgaacaaaatacccaccg

SEQ ID NO: 53815 - DNA, 50 bp, synthetic construct
  source 1..50: mol_type = other DNA
aaattttaaaataaacaataaacactttatccacataccctacaccttca

SEQ ID NO: 53816 - DNA, 50 bp, synthetic construct
  source 1..50: mol_type = other DNA
aaattttaaaataaacgataaacactttatccgcataccctacgccttcg

SEQ ID NO: 53817 - DNA, 50 bp, synthetic construct
  source 1..50: mol_type = other DNA
cttcccctataaaactatcaacaaccatcaaaaaatacaccaaaataaca

SEQ ID NO: 53818 - DNA, 50 bp, synthetic construct
  source 1..50: mol_type = other DNA
cttcccctataaaactatcaacgaccatcaaaaaatacgccgaaataacg

SEQ ID NO: 53819 - DNA, 50 bp, synthetic construct
  source 1..50: mol_type = other DNA
tcccctataaaactatcaacaaccatcaaaaaatacaccaaaataacaca

SEQ ID NO: 53820 - DNA, 50 bp, synthetic construct
  source 1..50: mol_type = other DNA
tcccctataaaactatcaacgaccatcaaaaaatacgccgaaataacgcg

SEQ ID NO: 53821 - DNA, 50 bp, synthetic construct
  source 1..50: mol_type = other DNA
aaatcaattacccataattccctacacaactctataaatacaaaaaatca

SEQ ID NO: 53822 - DNA, 50 bp, synthetic construct
  source 1..50: mol_type = other DNA
aaatcgattacccgtaattccctacgcaactctataaatacgaaaaatcg

SEQ ID NO: 53823 - DNA, 50 bp, synthetic construct
  source 1..50: mol_type = other DNA
acaaaaaaaaatcaattacccataattccctacacaactctataaataca

SEQ ID NO: 53824 - DNA, 50 bp, synthetic construct
  source 1..50: mol_type = other DNA
acaaaaaaaaatcgattacccgtaattccctacgcaactctataaatacg

SEQ ID NO: 53825 - DNA, 50 bp, synthetic construct
  source 1..50: mol_type = other DNA
taaatacctaaaacccacaaaaaaaataaacacaataacacaacctaaca

SEQ ID NO: 53826 - DNA, 50 bp, synthetic construct
  source 1..50: mol_type = other DNA
taaatacctaaaacccgcaaaaaaaataaacgcgataacgcgacctaacg

SEQ ID NO: 53827 - DNA, 50 bp, synthetic construct
  source 1..50: mol_type = other DNA
aaccacactataaatacctaaaacccacaaaaaaaataaacacaataaca

SEQ ID NO: 53828 - DNA, 50 bp, synthetic construct
  source 1..50: mol_type = other DNA
aaccgcgctataaatacctaaaacccgcaaaaaaaataaacgcgataacg

SEQ ID NO: 53829 - DNA, 50 bp, synthetic construct
  source 1..50: mol_type = other DNA
aaacttaaccacactataaatacctaaaacccacaaaaaaaataaacaca

SEQ ID NO: 53830 - DNA, 50 bp, synthetic construct
  source 1..50: mol_type = other DNA
aaacttaaccgcgctataaatacctaaaacccgcaaaaaaaataaacgcg

SEQ ID NO: 53831 - DNA, 50 bp, synthetic construct
  source 1..50: mol_type = other DNA
aaaaccaacaaacaaataaacttaaccacactataaatacctaaaaccca

SEQ ID NO: 53832 - DNA, 50 bp, synthetic construct
  source 1..50: mol_type = other DNA
aaaaccgacgaacaaataaacttaaccgcgctataaatacctaaaacccg

SEQ ID NO: 53833 - DNA, 50 bp, synthetic construct
  source 1..50: mol_type = other DNA
aaaaacaaaaatcataacaaaacaaaacaaaactttatccacaaaccaca

SEQ ID NO: 53834 - DNA, 50 bp, synthetic construct
  source 1..50: mol_type = other DNA
aaaaacgaaaatcgtaacgaaacgaaacgaaactttatccacgaaccgcg

SEQ ID NO: 53835 - DNA, 50 bp, synthetic construct
  source 1..50: mol_type = other DNA
acaaaaacaaaaatcataacaaaacaaaacaaaactttatccacaaacca

SEQ ID NO: 53836 - DNA, 50 bp, synthetic construct
  source 1..50: mol_type = other DNA
acaaaaacgaaaatcgtaacgaaacgaaacgaaactttatccacgaaccg

SEQ ID NO: 53837 - DNA, 50 bp, synthetic construct
  source 1..50: mol_type = other DNA
accaaacaaaaacaaaaatcataacaaaacaaaacaaaactttatccaca

SEQ ID NO: 53838 - DNA, 50 bp, synthetic construct
  source 1..50: mol_type = other DNA
gccaaacaaaaacgaaaatcgtaacgaaacgaaacgaaactttatccacg

SEQ ID NO: 53839 - DNA, 50 bp, synthetic construct
  source 1..50: mol_type = other DNA
aaaaaacccatcaaccataactaccatctaacttctaccctataacccca

SEQ ID NO: 53840 - DNA, 50 bp, synthetic construct
  source 1..50: mol_type = other DNA
aaaaaacccgtcaaccataactaccatctaacttctaccctataaccccg
